(19) United States
(12) Patent Application Publication
(10) Pub. No.: US 2002/0059663 A1
(43) Pub. Date: May 16, 2002

(54) Expressed sequences of arabidopsis thaliana

(76) Inventors: Jorn Gorlach, Durham, NC (US); Yong-Qiang An, San Diego, CA (US); Carol M. Hamilton, Apex, NC (US); Jennifer L. Price, Raleigh, NC (US); Tracy M. Raines, Durham, NC (US); Yang Yu, Matinsville, NJ (US); Joshua G. Rameaka, Durham, NC (US); Amy Page, Durham, NC (US); Abraham V. Mathew, Cary, NC (US); Brooke L. Ledford, Holly Springs, NC (US); Jeffrey P. Woessner, Hillsborough, NC (US); William David Haas, Durham, NC (US); Carlos A. Garcia, Carrboro, NC (US); Maja Kricker, Pittsboro, NC (US); Ted Slater, Apex, NC (US); Keith R. Davis, Durham, NC (US); Keith Allen, Cary, NC (US); Neil Hoffman, Chapel Hill, NC (US); Patrick Hurban, Raleigh, NC (US)

Correspondence Address: PARADIGM GENETICS, INC, 104 ALEXANDER DRIVE, BUILDING 2, P O BOX 14528, RTP, NC, 277094528

(21) Appl. No.: 09/770,149

(22) Filed: Jan. 26, 2001

Related U.S. Application Data
(60) Provisional application No. 60/178,506, filed on Jan. 27, 2000.

(51) Int. Cl. A01H 5/00; C12N 15/82

(52) U.S. Cl. 800/298; 536/23.6; 435/320.1; 530/350; 435/419

(57) ABSTRACT

Isolated nucleotide compositions and sequences are provided for Arabidopsis thaliana genes. The nucleic acid compositions find use in identifying homologous or related genes; in producing compositions that modulate the expression or function of its encoded protein, mapping functional regions of the protein; and in studying associated physiological pathways. The genetic sequences may also be used for the genetic manipulation of cells, particularly of plant cells. The encoded gene products and modified organisms are useful for screening of biologically active agents, e.g. fungicides, insecticides, etc.; for elucidating biochemical pathways; and the like.

### CROSS -REFERENCE TO RELATED APPLICATION

[0001] This application claims the benefit of U.S. Provisional Application No. 60/178,506 Filed Jan. 27, 2000.

### FIELD OF INVENTION

[0002] The invention is in the field of polynucleotide sequences of a plant, particularly sequences expressed in arabidopsis thaliana.

### BACKGROUND OF THE INVENTION

[0003] Plants and plant products have vast commercial importance in a wide variety of areas including food crops for human and animal consumption, flavor enhancers for food, and production of specialty chemicals for use in products such as medicaments and fragrances. In considering food crops for humans and livestock, genes such as those involved in a plants resistance to insects, plant viruses, and fungi; genes involved in pollination; and genes whose products enhance the nutritional value of the food, are of major importance. A number of such genes have been described, see, for example, McCaskill and Croteau (1999) Nature Biotechnol. 17:31-36.

[0004] Despite recent advances in methods for identification, cloning, and characterization of genes, much remains to be learned about plant physiology in general, including how plants produce many of the above-mentioned products; mechanisms for resistance to herbicides, insects, plant viruses, fungi; elucidation of genes involved in specific biosynthetic pathways; and genes involved in environmental tolerance, e.g., salt tolerance, drought tolerance, or tolerance to anaerobic conditions.

[0005] Arabidopsis thaliana is a model system for genetic, molecular and biochemical studies of higher plants. Features of this plant that make it a model system for genetic and molecular biology research include a small genome size, organized into five chromosomes and containing an estimated 20,000 genes, a rapid life cycle, prolific seed production and, since it is small, it can easily be cultivation in limited space. A. thaliana is a member of the mustard family (Brassicaceae) with a broad natural distribution throughout Europe, Asia, and North America. Many different ecotypes have been collected from natural populations and are available for experimental analysis. The entire life cycle, including seed germination, formation of a rosette plant, bolting of the main stem, flowering, and maturation of the first seeds, is completed in 6 weeks. A large number of mutant lines are available that affect nearly all aspects of its growth. These features greatly facilitate the isolation of fundamentally interesting and potentially important genes for agronomic development

[0006] Most gene products from higher plants exhibit adequate sequence similarity to deduced amino acid sequences of other plant genes to permit assignment of probable gene function, if it is known, in any higher plant. It is likely that there will be very few protein-encoding angiosperm genes that do not have orthologs or paralogs in Arabidopsis. The developmental diversity of higher plants may be largely due to changes in the cis-regulatory sequences of transcriptional regulators and not in coding sequences.

[0007] Many advances reported over the past few years offer clear evidence that this plant is not only a very important model species for basic research, but also extremely valuable for applied plant scientists and plant breeders. Knowledge gained from Arabidopsis can be used directly to develop desired traits in plants of other species.

### Relevant Literature

[0008] Cold Spring Harbor Monograph 27 (1994) E. M. Meyerowitz and C. R. Somerville, eds. (CSH Laboratory Press). Annual Plant Reviews, Vol. 1: Arabidopsis (1998) M. Anderson and J. A. Roberts, eds. (CRC Press). Methods in Molecular Biology: Arabidopsis Protocols, Vol. 82 (1997) J. M. Martinez-Zapater and J. Salinas, eds. (CRC Press).

[0009] Mayer et al (1999) Nature 402(6763):769-77; “Sequence and analysis of chromosome 4 of the plant Arabidopsis thaliana.” Lin et al. (1999) 402 (6763):761-8, “Sequence and analysis of chromosome 2 of the plant Arabidopsis thaliana.” Meinke et al. (1998) Science 282:662-682, “Arabidopsis thaliana: a model plant for genome analysis”. Somerville and Somerville (1999) Science 285:380-383, “Plant functional genomics”. Mozo et al. (1999) Nat. Genet. 22:271-275, “A complete BAC-based physical map of the Arabidopsis thaliana genome”.

### SUMMARY OF THE INVENTION

[0010] Novel nucleic acid sequences of Arabidopsis thaliana, their encoded polypeptides and variants thereof, genes corresponding to these nucleic acids, and proteins expressed by the genes, are provided.

[0011] The invention also provides diagnostic, prophylactic and therapeutic agents employing such novel nucleic acids, their corresponding genes or gene products, including expression constructs, probes, antisense constructs, and the like. The genetic sequences may also be used for the genetic manipulation of plant cells, particularly dicotyledonous plants. The encoded gene products and modified organisms are useful for introducing or improving disease resistance and stress tolerance into plants; screening of biologically active agents, e.g. fungicides, etc.; for elucidating biochemical pathways; and the like.

[0012] In one embodiment of the invention, a nucleic acid is provided that comprises a start codon; an optional intervening sequence; a coding sequence capable of hybridizing under stringent conditions as set forth in SEQ ID NO:1 to 999; and an optional terminal sequence, wherein at least one of said optional sequences is present. Such a nucleic acid may correspond to naturally occurring Arabidopsis expressed sequences.

### DETAILED DESCRIPTION OF THE INVENTION

[0013] Novel nucleic acid sequences from Arabidopsis thaliana, their encoded polypeptides and variants thereof, genes corresponding to these nucleic acids and proteins expressed by the genes are provided. The invention also provides agents employing such novel nucleic acids, their corresponding genes or gene products, including expression constructs, probes, antisense constructs, and the like. The nucleotide sequences are provided in the attached SEQLIST.

[0014] Sequences include, but are not limited to, sequences that encode resistance proteins; sequences that encode tolerance factors; sequences encoding proteins or other factors that are involved, directly or indirectly in biochemical pathways such as metabolic or biosynthetic pathways, sequences involved in signal transduction, sequences involved in the regulation of gene expression, structural genes, and the like. Biosynthetic pathways of interest include, but are not limited to, biosynthetic pathways whose product (which may be an end product or an intermediate) is of commercial, nutritional, or medicinal value.

[0015] The sequences may be used in screening assays of various plant strains to determine the strains that are best capable of withstanding a particular disease or environmental stress. Sequences encoding activators and resistance proteins may be introduced into plants that are deficient in these sequences. Alternatively, the sequences may be introduced under the control of promoters that are convenient for induction of expression. The protein products may be used in screening programs for insecticides, fungicides and antibiotics to determine agents that mimic or enhance the resistance proteins. Such agents may be used in improved methods of treating crops to prevent or treat disease. The protein products may also be used in screening programs to identify agents which mimic or enhance the action of tolerance factors. Such agents may be used in improved methods of treating crops to enhance their tolerance to environmental stresses.

[0016] Still other embodiments of the invention provide methods for enhancing or inhibiting production of a biosynthetic product in a plant by introducing a nucleic acid of the invention into a plant cell, where the nucleic acid comprises sequences encoding a factor which is involved, directly or indirectly in a biosynthetic pathway whose products are of commercial, nutritional, or medicinal value include any factor, usually a protein or peptide, which regulates such a biosynthetic pathway; which is an intermediate in such a biosynthetic pathway; or which in itself is a product that increases the nutritional value of a food product; or which is a medicinal product; or which is any product of commercial value.

[0017] Transgenic plants containing the antisense nucleic acids of the invention are useful for identifying other mediators that may induce expression of proteins of interest; for establishing the extent to which any specific insect and/or pathogen is responsible for damage of a particular plant; for identifying other mediators that may enhance or induce tolerance to environmental stress; for identifying factors involved in biosynthetic pathways of nutritional, commercial, or medicinal value; or for identifying products of nutritional, commercial, or medicinal value.

[0018] In still other embodiments, the invention provides transgenic plants constructed by introducing a subject nucleic acid of the invention into a plant cell, and growing the cell into a callus and then into a plant; or, alternatively by breeding a transgenic plant from the subject process with a second plant to form an F1 or higher hybrid. The subject transgenic plants and progeny are used as crops for their enhanced disease resistance, enhanced traits of interest, for example size or flavor of fruit, length of growth cycle, etc., or for screening programs, e.g. to determine more effective insecticides, etc; used as crops which exhibit enhanced tolerance environmental stress; or used to produce a factor.

[0019] Those skilled in the art will recognize the agricultural advantages inherent in plants constructed to have either increased or decreased expression of resistance proteins; or increased or decreased tolerance to environmental factors; or which produce or over-produce one or more factors involved in a biosynthetic pathway whose product is of commercial, nutritional, or medicinal value. For example, such plants may have increased resistance to attack by predators, insects, pathogens, microorganisms, herbivores, mechanical damage and the like; may be more tolerant to environmental stress, e.g. may be better able to withstand drought conditions, freezing, and the like; or may produce a product not normally made in the plant, or may produce a product in higher than normal amounts, where the product has commercial, nutritional, or medicinal value. Plants which may be useful include dicotyledons and monocotyledons. Representative examples of plants in which the provided sequences may be useful include tomato, potato, tobacco, cotton, soybean, alfalfa, rape, and the like. Monocotyledons, more particularly grasses (Poaceae family) of interest, include, without limitation, Avena sativa (oat); Avena strigosa (black oat); Elymus (wild rye); Hordeum sp. including Hordeum vulgare (barley); Oryza sp., including Oryza glaberrima (African rice); Oryza longistaminata (long-staminate rice); Pennisetum americanum (pearl millet); Sorghum sp. (sorghum); Triticum sp., including Triticum aestivum (common wheat); Triticum durum (durum wheat); Zea mays (corn); etc.

### NUCLEIC ACID COMPOSITIONS

[0020] The following detailed description describes the nucleic acid compositions encompassed by the invention, methods for obtaining cDNA or genomic DNA encoding a full-length gene product, expression of these nucleic acids and genes; identification of structural motifs of the nucleic acids and genes; identification of the function of a gene product encoded by a gene corresponding to a nucleic acid of the invention; use of the provided nucleic acids as probes, in mapping, and in diagnosis; use of the corresponding polypeptides and other gene products to raise antibodies; use of the nucleic acids in genetic modification of plant and other species; and use of the nucleic acids, their encoded gene products, and modified organisms, for screening and diagnostic purposes.

[0021] The scope of the invention with respect to nucleic acid compositions includes, but is not necessarily limited to, nucleic acids having a sequence set forth in any one of SEQ ID NOS:1-999; nucleic acids that hybridize the provided sequences under stringent conditions; genes corresponding to the provided nucleic acids; variants of the provided nucleic acids and their corresponding genes, particularly those variants that retain a biological activity of the encoded gene product.

[0022] In one embodiment, the sequences of the invention provide a polypeptide coding sequence. The polypeptide coding sequence may correspond to a naturally expressed mRNA in Arabidopsis or other species, or may encode a fusion protein between one of the provided sequences and an exogenous protein coding sequence. The coding sequence is characterized by an ATG start codon, a lack of stop codons in-frame with the ATG, and a termination codon, that is, a continuous open frame is provided between the start and the stop codon. The sequence contained between the start and the stop codon will comprise a sequence capable of hybridizing under stringent conditions to a sequence set for in SEQ ID NO:1-999, and may comprise the sequence set forth in the Seqlist.

[0023] Other nucleic acid compositions contemplated by and within the scope of the present invention will be readily apparent to one of ordinary skill in the art when provided with the disclosure here.

[0024] The invention features nucleic acids that are derived from Arabidopsis thaliana. Novel nucleic acid compositions of the invention of particular interest comprise a sequence set forth in any one of SEQ ID NOS:1-999 or an identifying sequence thereof. An “identifying sequence” is a contiguous sequence of residues at least about 10 nt to about 20 nt in length, usually at least about 50 nt to about 100 nt in length, that uniquely identifies a nucleic acid sequence, e.g., exhibits less than 90%, usually less than about 80% to about 85% sequence identity to any contiguous nucleotide sequence of more than about 20 nt. Thus, the subject novel nucleic acid compositions include full length cDNAs or mRNAs that encompass an identifying sequence of contiguous nucleotides from any one of SEQ ID NOS:1-999.

[0025] The nucleic acids of the invention also include nucleic acids having sequence similarity or sequence identity. Nucleic acids having sequence similarity are detected by hybridization under low stringency conditions, for example, at 50° C. and 10XSSC (0.9M NaCl/0.09M sodium citrate) and remain bound when subjected to washing at 55° C. in 1XSSC. Sequence identity can be determined by hybridization under stringent conditions, for example, at 50° C. or higher and 0.1XSSC (9 mM NaCl/0.9 mM sodium citrate). Hybridization methods and conditions are well known in the art, see U.S. Pat. No. 5,707,829. Nucleic acids that are substantially identical to the provided nucleic acid sequences, e.g. allelic variants, genetically altered versions of the gene, etc., bind to the provided nucleic acid sequences (SEQ ID NOS:1-999) under stringent hybridization conditions. By using probes, particularly labeled probes of DNA sequences, one can isolate homologous or related genes. The source of homologous genes can be any species, particularly grasses as previously described.

[0026] Preferably, hybridization is performed using at least 15 contiguous nucleotides of at least one of SEQ ID NOS:1-999. The probe will preferentially hybridize with a nucleic acid or mRNA comprising the complementary sequence, allowing the identification and retrieval of the nucleic acids of the biological material that uniquely hybridize to the selected probe. Probes of more than 15 nucleotides can be used, e.g. probes of from about 18 nucleotides up to the entire length of the provided nucleic acid sequences, but 15 nucleotides generally represents sufficient sequence for unique identification.

[0027] The nucleic acids of the invention also include naturally occurring variants of the nucleotide sequences, e.g. degenerate variants, allelic variants, etc. Variants of the nucleic acids of the invention are identified by hybridization of putative variants with nucleotide sequences disclosed herein, preferably by hybridization under stringent conditions For example, by using appropriate wash conditions, variants of the nucleic acids of the invention can be identified where the allelic variant exhibits at most about 25-30% base pair mismatches relative to the selected nucleic acid probe. In general, allelic variants contain 5-25% base pair mismatches, and can contain as little as even 2-5%, or 1-2% base pair mismatches, as well as a single base-pair mismatch.

[0028] The invention also encompasses homologs corresponding to the nucleic acids of SEQ ID NOS:1-999, where the source of homologous genes can be any related species, usually within the same genus or group. Homologs have substantial sequence similarity, e.g. at least 75% sequence identity, usually at least 90%, more usually at least 95% between nucleotide sequences. Sequence similarity is calculated based on a reference sequence, which may be a subset of a larger sequence, such as a conserved motif, coding region, flanking region, etc. A reference sequence will usually be at least about 18 contiguous nt long, more usually at least about 30 nt long, and may extend to the complete sequence that is being compared. Algorithms for sequence analysis are known in the art, such as BLAST, described in Altschul et al., J. Mol. Biol. (1990) 215:403-10.

[0029] In general, variants of the invention have a sequence identity greater than at least about 65%, preferably at least about 75%, more preferably at least about 85%, and can be greater than at least about 90% or more as determined by the Smith-Waterman homology search algorithm as implemented in MPSRCH program (Oxford Molecular). For the purposes of this invention, a preferred method of calculating percent identity is the Smith-Waterman algorithm, using the following. Global DNA sequence identity must be greater than 65% as determined by the Smith-Wateman homology search algorithm as implemented in MPSRCH program (Oxford Molecular) using an affine gap search with the following search parameters: gap open penalty, 12; and gap extention penalty, 1.

[0030] The subject nucleic acids can be cDNAs or genomic DNAs, as well as fragments thereof, particularly fragments that encode a biologically active gene product and/or are useful in the methods disclosed herein. The term “cDNA” as used herein is intended to include all nucleic acids that share the arrangement of sequence elements found in native mature mRNA species, where sequence elements are exons and 3′ and 5′ non-coding regions. Normally mRNA species have contiguous exons, with the introns, when present, being removed by nuclear RNA splicing, to create a continuous open reading frame encoding a polypeptide of the invention.

[0031] A genomic sequence of interest comprises the nucleic acid present between the initiation codon and the stop codon, as defined in the listed sequences, including all of the introns that are normally present in a native chromosome. It can further include the 3′ and 5′ untranslated regions found in the mature mRNA. It can further include specific transcriptional and translational regulatory sequences, such as promoters, enhancers, etc., including about 1 kb, but possibly more, of flanking genomic DNA at either the 5′ and 3′ end of the transcribed region. The genomic DNA can be isolated as a fragment of 100 kb or smaller; and substantially free of flanking chromosomal sequence. The genomic DNA flanking the coding region, either 3′ and 5′, or internal regulatory sequences as sometimes found in introns, contains sequences required for expression.

[0032] The nucleic acid compositions of the subject invention can encode all or a part of the subject expressed polypeptides. Double or single stranded fragments can be obtained from the DNA sequence by chemically synthesizing oligonucleotides in accordance with conventional methods, by restriction enzyme digestion, by PCR amplification, etc. Isolated nucleic acids and nucleic acid fragments of the invention comprise at least about 15 up to about 100 contiguous nucleotides, or up to the complete sequence provided in SEQ ID NOS:1-999. For the most part, fragments will be of at least 15 nt, usually at least 18 nt or 25 nt, and up to at least about 50 contiguous nt in length or more.

[0033] Probes specific to the nucleic acids of the invention can be generated using the nucleic acid sequences disclosed in SEQ ID NOS:1-999 and the fragments as described above. The probes can be synthesized chemically or can be generated from longer nucleic acids using restriction enzymes. The probes can be labeled, for example, with a radioactive, biotinylated, or fluorescent tag. Preferably, probes are designed based upon an identifying sequence of a nucleic acid of one of SEQ ID NOS:1-999. More preferably, probes are designed based on a contiguous sequence of one of the subject nucleic acids that remain unmasked following application of a masking program for masking low complexity (e.g., XBLAST) to the sequence., i.e. one would select an unmasked region, as indicated by the nucleic acids outside the poly-n stretches of the masked sequence produced by the masking program.

[0034] The nucleic acids of the subject invention are isolated and obtained in substantial purity, generally as other than an intact chromosome. Usually, the nucleic acids, either as DNA or RNA, will be obtained substantially free of other naturally-occurring nucleic acid sequences, generally being at least about 50%, usually at least about 90% pure and are typically “recombinant”, e.g., flanked by one or more nucleotides with which it is not normally associated on a naturally occurring chromosome.

[0035] The nucleic acids of the invention can be provided as a linear molecule or within a circular molecule. They can be provided within autonomously replicating molecules (vectors) or within molecules without replication sequences. They can be regulated by their own or by other regulatory sequences, as is known in the art. The nucleic acids of the invention can be introduced into suitable host cells using a variety of techniques which are available in the art, such as transferring polycation-mediated DNA transfer, transfection with naked or encapsulated nucleic acids, liposome-mediated DNA transfer, intracellular transportation of DNA-coated latex beads, protoplast fusion, viral infection, electroporation, gene gun, calcium phosphate-mediated transfection, and the like.

[0036] The subject nucleic acid compositions can be used to, for example, produce polypeptides, as probes for the detection of mRNA of the invention in biological samples, e.g. extracts of cells, to generate additional copies of the nucleic acids, to generate ribozymes or antisense oligonucleotides, and as single stranded DNA probes or as triple-strand forming oligonucleotides. The probes described herein can be used to, for example, determine the presence or absence of the nucleic acid sequences as shown in SEQ ID NOS:1-999 or variants thereof in a sample. These and other uses are described in more detail below.

### USE OF NUCLEIC ACIDS AS CODING SEQUENCES

[0037] Naturally occurring Arabidopsis polypeptides or fragments thereof are encoded by the provided nucleic acids. Methods are known in the art to determine whether the complete native protein is encoded by a candidate nucleic acid sequence. Where the provided sequence encodes a fragment of a polypeptide, methods known in the art may be used to determine the remaining sequence. These approaches may utilize a bioinformatics approach, a cloning approach, extension of mRNA species, etc.

[0038] Substantial genomic sequence is available for Arabidopsis, and may be exploited for determining the complete coding sequence corresponding to the provided sequences. The region of the chromosome to which a given sequence is located may be determined by hybridization or by database searching. The genomic sequence is then searched upstream and downstream for the presence of intron/exon boundaries, and for motifs characteristic of transcriptional start and stop sequences, for example by using Genscan (Burge and Karlin (1997) J. Mol. Biol. 268:78-94); or GRAIL (Uberbacher and Mural (1991) P.N.A.S. 88:11261-1265).

[0039] Alternatively, nucleic acid having a sequence of one of SEQ ID NOS:1-999, or an identifying fragment thereof, is used as a hybridization probe to complementary molecules in a cDNA library using probe design methods, cloning methods, and clone selection techniques as known in the art. Libraries of cDNA are made from selected cells. The cells may be those of A. thaliana, or of related species. In some cases it will be desirable to select cells from a particular stage, e.g. seeds, leaves, infected cells, etc.

[0040] Techniques for producing and probing nucleic acid sequence libraries are described, for example, in Sambrook et al., Molecular Cloning: A Laboratory Manual, 2^{nd} Ed., (1989) Cold Spring Harbor Press, Cold Spring Harbor, N.Y.; and Current Protocols in Molecular Biology, (1987 and updates) Ausubel et al., eds. The cDNA can be prepared by using primers based on sequence from SEQ ID NOS:1-999. In one embodiment, the cDNA library can be made from only poly-adenylated mRNA. Thus, poly-T primers can be used to prepare cDNA from the mRNA.

[0041] Members of the library that are larger than the provided nucleic acids, and preferably that encompass the complete coding sequence of the native message, are obtained. In order to confirm that the entire cDNA has been obtained, RNA protection experiments are performed as follows. Hybridization of a full-length cDNA to an mRNA will protect the RNA from RNase degradation. If the cDNA is not full length, then the portions of the mRNA that are not hybridized will be subject to RNase degradation. This is assayed, as is known in the art, by changes in electrophoretic mobility on polyacrylamide gels, or by detection of released monoribonucleotides. Sambrook et al., Molecular Cloning: A Laboratory Manual, 2^{nd} Ed., (1989) Cold Spring Harbor Press, Cold Spring Harbor, N.Y. In order to obtain additional sequences 5′ to the end of a partial cDNA, 5′ RACE (PCR Protocols: A Guide to Methods and Applications, (1990) Academic Press, Inc.) may be performed.

[0042] Genomic DNA is isolated using the provided nucleic acids in a manner similar to the isolation of full-length cDNAs. Briefly, the provided nucleic acids, or portions thereof, are used as probes to libraries of genomic DNA. Preferably, the library is obtained from the cell type that was used to generate the nucleic acids of the invention, but this is not essential. Such libraries can be in vectors suitable for carrying large segments of a genome, such as P1 or YAC, as described in detail in Sambrook et al., 9.4-9.30. In order to obtain additional 5′ or 3′ sequences, chromosome walking is performed, as described in Sambrook et al., such that adjacent and overlapping fragments of genomic DNA are isolated. These are mapped and pieced together, as is known in the art, using restriction digestion enzymes and DNA ligase.

[0043] PCR methods may be used to amplify the members of a cDNA library that comprise the desired insert. In this case, the desired insert will contain sequence from the full length cDNA that corresponds to the instant nucleic acids. Such PCR methods include gene trapping and RACE methods. Gene trapping entails inserting a member of a cDNA library into a vector. The vector then is denatured to produce single stranded molecules. Next, a substrate-bound probe, such a biotinylated oligo, is used to trap cDNA inserts of interest. Biotinylated probes can be linked to an avidin-bound solid substrate. PCR methods can be used to amplify the trapped cDNA. To trap sequences corresponding to the full length genes, the labeled probe sequence is based on the nucleic acid sequences of the invention. Random primers or primers specific to the library vector can be used to amplify the trapped cDNA. Such gene trapping techniques are described in Gruber et al., WO 95/04745 and Gruber et al., U.S. Pat. No. 5,500,356. Kits are commercially available to perform gene trapping experiments from, for example, Life Technologies, Gaithersburg, Md., USA.

[0044] “Rapid amplification of cDNA ends”, or RACE, is a PCR method of amplifying cDNAs from a number of different RNAs. The cDNAs are ligated to an oligonucleotide linker, and amplified by PCR using two primers. One primer is based on sequence from the instant nucleic acids, for which full length sequence is desired, and a second primer comprises sequence that hybridizes to the oligonucleotide linker to amplify the cDNA. A description of this methods is reported in WO 97/19110. A common primer may be designed to anneal to an arbitrary adaptor sequence ligated to cDNA ends. When a single gene-specific RACE primer is paired with the common primer, preferential amplification of sequences between the single gene specific primer and the common primer occurs. Commercial cDNA pools modified for use in RACE are available.

[0045] Once the full-length cDNA or gene is obtained, DNA encoding variants can be prepared by site-directed mutagenesis, described in detail in Sambrook et al., 15.3-15.63. The choice of codon or nucleotide to be replaced can be based on disclosure herein on optional changes in amino acids to achieve altered protein structure and/or function. As an alternative method to obtaining DNA or RNA from a biological material, nucleic acid comprising nucleotides having the sequence of one or more nucleic acids of the invention can be synthesized.

### EXPRESSION OF POLYPEPTIDES

[0046] The provided nucleic acid, e.g. a nucleic acid having a sequence of one of SEQ ID NOS:1-999), the corresponding cDNA, the polypeptide coding sequence as described above, or the full-length gene is used to express a partial or complete gene product. Constructs of nucleic acids having sequences of SEQ ID NOS:1-999 can be generated by recombinant methods, synthetically, or in a single-step assembly of a gene and entire plasmid from large numbers of oligodeoxyribonucleotides is described by, e.g. Stemmer et al., Gene (Amsterdam) (1995) 164(1):49-53.

[0047] Appropriate nucleic acid constructs are purified using standard recombinant DNA techniques as described in, for example, Sambrook et al., Molecular Cloning: A Laboratory Manual, 2^{nd} Ed., (1989) Cold Spring Harbor Press, Cold Spring Harbor, N.Y. The gene product encoded by a nucleic acid of the invention is expressed in any expression system, including, for example, bacterial, yeast, insect, amphibian and mammalian systems.

[0048] The subject nucleic acid molecules are generally propagated by placing the molecule in a vector. Viral and non-viral vectors are used, including plasmids. The choice of plasmid will depend on the type of cell in which propagation is desired and the purpose of propagation. Certain vectors are useful for amplifying and making large amounts of the desired DNA sequence. Other vectors are suitable for expression in cells in culture. Still other vectors are suitable for transfer and expression in cells in a whole organism or person. The choice of appropriate vector is well within the skill of the art. Many such vectors are available commercially.

[0049] The nucleic acids set forth in SEQ ID NOS:1-999 or their corresponding full-length nucleic acids are linked to regulatory sequences as appropriate to obtain the desired expression properties. These can include promoters attached either at the 5′ end of the sense strand or at the 3′ end of the antisense strand, enhancers, terminators, operators, repressors, and inducers. The promoters can be regulated or constitutive. In some situations it may be desirable to use conditionally active promoters, such as tissue-specific or developmental stage-specific promoters. These are linked to the desired nucleotide sequence using the techniques described above for linkage to vectors. Any techniques known in the art can be used.

[0050] When any of the above host cells, or other appropriate host cells or organisms, are used to replicate and/or express the nucleic acids or nucleic acids of the invention, the resulting replicated nucleic acid, RNA, expressed protein or polypeptide, is within the scope of the invention as a product of the host cell or organism. The product is recovered by any appropriate means known in the art.

### IDENTIFICATION OF FUNCTIONAL AND STRUCTURAL MOTIFS

[0051] Translations of the nucleotide sequence of the provided nucleic acids, cDNAs or full genes can be aligned with individual known sequences. Similarity with individual sequences can be used to determine the activity of the polypeptides encoded by the nucleic acids of the invention. Also, sequences exhibiting similarity with more than one individual sequence can exhibit activities that are characteristic of either or both individual sequences.

[0052] The six possible reading frames may be translated using programs such as GCG pepdata, or GCG Frames (Wisconsin Package Version 10.0, Genetics Computer Group (GCG), Madison, Wis., USA. ). Programs such as ORFFinder (National Center for Biotechnology Information (NCBI) a division of the National Library of Medicine (NLM) at the National Institutes of Health (NIH) http://www.ncbi.nlm.nih.gov/) may be used to identify open reading frames (ORFs) in sequences. ORF finder identifies all possible ORFs in a DNA sequence by locating the standard and alternative stop and start codons. Other ORF identification programs include Genie (Kulp et al. (1996).

[0053] A generalized Hidden Markov Model may be used for the recognition of genes in DNA. (ISMB-96, St. Louis, Mo., AAAI/MIT Press; Reese et al. (1997), “Improved splice site detection in Genie”. Proceedings of the First Annual International Conference on Computational Molecular Biology RECOMB 1997, Santa Fe, N.M., ACM Press, New York., P. 34.); BESTORF—Prediction of potential coding fragment in human or plant EST/mRNA sequence data using Markov Chain Models; and FGENEP—Multiple genes structure prediction in plant genomic DNA (Solovyev et al. (1995) Identification of human gene structure using linear discriminant functions and dynamic programming. In Proceedings of the Third International Conference on Intelligent Systems for Molecular Biology eds. Rawling et al. Cambridge, England, AAAI Press,367-375.; Solovyev et al. (1994) Nucl. Acids Res. 22(24):5156-5163; Solovyev et al,. The prediction of human exons by oligonucleotide composition and discriminant analysis of spliceable open reading frames, in: The Second International conference on Intelligent systems for Molecular Biology (eds. Altman et al.), AAAI Press, Menlo Park, Calif. (1994, 354-362) Solovyev and Lawrence, Prediction of human gene structure using dynamic programming and oligonucleotide composition, In: Abstracts of the 4th annual Keck symposium. Pittsburgh, 47,1993; Burge and Karlin (1997) J. Mol. Biol. 268:78-94; Kulp et al. (1996) Proc. Conf. on Intelligent Systems in Molecular Biology '96, 134-142).

[0054] The full length sequences and fragments of the nucleic acid sequences of the nearest neighbors can be used as probes and primers to identify and isolate the full length sequence corresponding to provided nucleic acids. Typically, a selected nucleic acid is translated in all six frames to determine the best alignment with the individual sequences. These amino acid sequences are referred to, generally, as query sequences, which are aligned with the individual sequences. Suitable databases include Genbank, EMBL, and DNA Database of Japan (DDBJ).

[0055] Query and individual sequences can be aligned using the methods and computer programs described above, and include BLAST, available by ftp at ftp://ncbi.nlm.nih.gov/.

[0056] Gapped BLAST and PSI-BLAST are useful search tools provided by NCBI. (version 2.0) (Altschul et al., 1997). Position-Specific Iterated BLAST (PSI-BLAST) provides an automated, easy-to-use version of a “profile” search, which is a sensitive way to look for sequence homologues. The program first performs a gapped BLAST database search. The PSI-BLAST program uses the information from any significant alignments returned to construct a position-specific score matrix, which replaces the query sequence for the next round of database searching. PSI-BLAST may be iterated until no new significant alignments are found. The Gapped BLAST algorithm allows gaps (deletions and insertions) to be introduced into the alignments that are returned. Allowing gaps means that similar regions are not broken into several segments. The scoring of these gapped alignments tends to reflect biological relationships more closely. The Smith-Waterman is another algorithm that produces local or global gapped sequence alignments, see Meth. Mol. Biol. (1997) 70: 173-187. Also, the GAP program using the Needleman and Wunsch global alignment method can be utilized for sequence alignments.

[0057] Results of individual and query sequence alignments can be divided into three categories, high similarity, weak similarity, and no similarity. Individual alignment results ranging from high similarity to weak similarity provide a basis for determining polypeptide activity and/or structure. Parameters for categorizing individual results include: percentage of the alignment region length where the strongest alignment is found, percent sequence identity, and e value.

[0058] The percentage of the alignment region length is calculated by counting the number of residues of the individual sequence found in the region of strongest alignment, e.g. contiguous region of the individual sequence that contains the greatest number of residues that are identical to the residues of the corresponding region of the aligned query sequence. This number is divided by the total residue length of the query sequence to calculate a percentage. For example, a query sequence of 20 amino acid residues might be aligned with a 20 amino acid region of an individual sequence. The individual sequence might be identical to amino acid residues 5, 9-15, and 17-19 of the query sequence. The region of strongest alignment is thus the region stretching from residue 9-19, an 11 amino acid stretch. The percentage of the alignment region length is: 11 (length of the region of strongest alignment) divided by (query sequence length) 20 or 55%.

[0059] Percent sequence identity is calculated by counting the number of amino acid matches between the query and individual sequence and dividing total number of matches by the number of residues of the individual sequences found in the region of strongest alignment. Thus, the percent identity in the example above would be 10 matches divided by 11 amino acids, or approximately, 90.9%

[0060] E value is the probability that the alignment was produced by chance. For a single alignment, the e value can be calculated according to Karlin et al., Proc. Natl. Acad. Sci. (1990) 87:2264 and Karlin et al., Proc. Natl. Acad. Sci. (1993) 90. The e value of multiple alignments using the same query sequence can be calculated using an heuristic approach described in Altschul et al., Nat. Genet. (1994) 6:119. Alignment programs such as BLAST program can calculate the e value.

[0061] Another factor to consider for determining identity or similarity is the location of the similarity or identity. Strong local alignment can indicate similarity even if the length of alignment is short. Sequence identity scattered throughout the length of the query sequence also can indicate a similarity between the query and profile sequences. The boundaries of the region where the sequences align can be determined according to Doolittle, supra; BLAST or FASTA programs; or by determining the area where sequence identity is highest.

[0062] In general, in alignment results considered to be of high similarity, the percent of the alignment region length is typically at least about 55% of total length query sequence; more typically, at least about 58%; even more typically; at least about 60% of the total residue length of the query sequence. Usually, percent length of the alignment region can be as much as about 62%; more usually, as much as about 64%; even more usually, as much as about 66%. Further, for high similarity, the region of alignment, typically, exhibits at least about 75% of sequence identity; more typically, at least about 78%; even more typically; at least about 80% sequence identity. Usually, percent sequence identity can be as much as about 82%; more usually, as much as about 84%; even more usually, as much as about 86%.

[0063] The p value is used in conjunction with these methods. The query sequence is considered to have a high similarity with a profile sequence when the p value is less than or equal to 10⁻². Confidence in the degree of similarity between the query sequence and the profile sequence increases as the p value become smaller.

[0064] In general, where alignment results considered to be of weak similarity, there is no minimum percent length of the alignment region nor minimum length of alignment. A better showing of weak similarity is considered when the region of alignment is, typically, at least about 15 amino acid residues in length; more typically, at least about 20; even more typically; at least about 25 amino acid residues in length. Usually, length of the alignment region can be as much as about 30 amino acid residues; more usually, as much as about 40; even more usually, as much as about 60 amino acid residues. Further, for weak similarity, the region of alignment, typically, exhibits at least about 35% of sequence identity; more typically, at least about 40%; even more typically; at least about 45% sequence identity. Usually, percent sequence identity can be as much as about 50%; more usually, as much as about 55%; even more usually, as much as about 60%.

[0065] The query sequence is considered to have a low similarity with a profile sequence when the p value is greater than 10⁻². Confidence in the degree of similarity between the query sequence and the profile sequence decreases as the p values become larger.

[0066] Sequence identity alone can be used to determine similarity of a query sequence to an individual sequence and can indicate the activity of the sequence. Such an alignment, preferably, permits gaps to align sequences. Typically, the query sequence is related to the profile sequence if the sequence identity over the entire query sequence is at least about 15%; more typically, at least about 20%; even more typically, at least about 25%; even more typically, at least about 50%. Sequence identity alone as a measure of similarity is most useful when the query sequence is usually, at least 80 residues in length; more usually, 90 residues; even more usually, at least 95 amino acid residues in length. More typically, similarity can be concluded based on sequence identity alone when the query sequence is preferably 100 residues in length; more preferably, 120 residues in length; even more preferably, 150 amino acid residues in length.

[0067] It is apparent, when studying protein sequence families, that some regions have been better conserved than others during evolution. These regions are generally important for the function of a protein and/or for the maintenance of its three-dimensional structure. By analyzing the constant and variable properties of such groups of similar sequences, it is possible to derive a signature for a protein family or domain, which distinguishes its members from all other unrelated proteins. A pertinent analogy is the use of fingerprints by the police for identification purposes. A fingerprint is generally sufficient to identify a given individual. Similarly, a protein signature can be used to assign a new sequence to a specific family of proteins and thus to formulate hypotheses about its function. The PROSITE database is a compendium of such fingerprints (motifs) and may be used with search software such as Wisconsin GCG Motifs to find motifs or fingerprints in query sequences. PROSITE currently contains signatures specific for about a thousand protein families or domains. Each of these signatures comes with documentation providing background information on the structure and function of these proteins (Hofmann et al. (1999) Nucleic Acids Res. 27:215-219; Bucher and Bairoch., A generalized profile syntax for biomolecular sequences motifs and its function in automatic sequence interpretation (In) ISMB-94; Proceedings 2nd International Conference on Intelligent Systems for Molecular Biology; Altman et al. Eds. (1994), pp 53-61, AAAI Press, Menlo Park).

[0068] Translations of the provided nucleic acids can be aligned with amino acid profiles that define either protein families or common motifs. Also, translations of the provided nucleic acids can be aligned to multiple sequence alignments (MSA) comprising the polypeptide sequences of members of protein families or motifs. Similarity or identity with profile sequences or MSAs can be used to determine the activity of the gene products (e.g., polypeptides) encoded by the provided nucleic acids or corresponding cDNA or genes.

[0069] Profiles can designed manually by (1) creating an MSA, which is an alignment of the amino acid sequence of members that belong to the family and (2) constructing a statistical representation of the alignment. Such methods are described, for example, in Birney et al., Nucl. Acid Res. (1996) 24(14): 2730-2739. MSAs of some protein families and motifs are available for downloading to a local server. For example, the PFAM database with MSAs of 547 different families and motifs, and the software (HMMER) to search the PFAM database may be downloaded from ftp:/fftp.genetics.wustl.edu/pub/eddy/pfam-4.4/ to allow secure searches on a local server. Pfam is a database of multiple alignments of protein domains or conserved protein regions., which represent evolutionary conserved structure that has implications for the proteins function (Sonnhammer et al. (1998) Nucl. Acid Res. 26:320-322; Bateman etal. (1999) Nucleic Acids Res. 27:260-262).

[0070] The 3D_ali databank (Pasarella, S. and Argos, P. (1992) Prot. Engineering 5:121-137) was constructed to incorporate new protein structural and sequence data. The databank has proved useful in many research fields such as protein sequence and structure analysis and comparison, protein folding, engineering and design and evolution. The collection enhances present protein structural knowledge by merging information from proteins of similar main-chain fold with homologous primary structures taken from large databases of all known sequences. 3D_ali databank files may be downloaded to a secure local server from http://www.emblheidelberg.de/argos/ali/ali_form.html.

[0071] The identify and function of the gene that correlates to a nucleic acid described herein can be determined by screening the nucleic acids or their corresponding amino acid sequences against profiles of protein families. Such profiles focus on common structural motifs among proteins of each family. Publicly available profiles are known in the art.

[0072] In comparing a novel nucleic acid with known sequences, several alignment tools are available. Examples include PileUp, which creates a multiple sequence alignment, and is described in Feng et al., J. Mol. Evol. (1987) 25:351. Another method, GAP, uses the alignment method of Needleman et al., J. Mol. Biol. (1970) 48:443. GAP is best suited for global alignment of sequences. A third method, BestFit, functions by inserting gaps to maximize the number of matches using the local homology algorithm of Smith et al. (1981) Adv. Appl. Math. 2:482.

### IDENTIFICATION OF SECRETED & MEMBRANE-BOUND POLYPEPTIDES

[0073] Secreted and membrane-bound polypeptides of the present invention are of interest. Because both secreted and membrane-bound polypeptides comprise a fragment of contiguous hydrophobic amino acids, hydrophobicity predicting algorithms can be used to identify such polypeptides. A signal sequence is usually encoded by both secreted and membrane-bound polypeptide genes to direct a polypeptide to the surface of the cell. The signal sequence usually comprises a stretch of hydrophobic residues. Such signal sequences can fold into helical structures. Membrane-bound polypeptides typically comprise at least one transmembrane region that possesses a stretch of hydrophobic amino acids that can transverse the membrane. Some transmembrane regions also exhibit a helical structure. Hydrophobic fragments within a polypeptide can be identified by using computer algorithms. Such algorithms include Hopp & Woods, Proc. Natl. Acad. Sci. USA (1981) 78:3824-3828; Kyte & Doolittle, J. Mol. Biol. (1982) 157: 105-132; and RAOAR algorithm, Degli Esposti et al., Eur. J. Biochem. (1990) 190: 207-219.

[0074] Another method of identifying secreted and membrane-bound polypeptides is to translate the nucleic acids of the invention in all six frames and determine if at least 8 contiguous hydrophobic amino acids are present. Those translated polypeptides with at least 8; more typically, 10; even more typically, 12 contiguous hydrophobic amino acids are considered to be either a putative secreted or membrane bound polypeptide. Hydrophobic amino acids include alanine, glycine, histidine, isoleucine, leucine, lysine, methionine, phenylalanine, proline, threonine, tryptophan, tyrosine, and valine.

### IDENTIFICATION OF THE FUNCTION OF AN EXPRESSION PRODUCT

[0075] The biological function of the encoded gene product of the invention may be determined by empirical or deductive methods. One promising avenue, termed phylogenomics, exploits the use of evolutionary information to facilitate assignment of gene function. The approach is based on the idea that functional predictions can be greatly improved by focusing on how genes became similar in sequence during evolution instead of focusing on the sequence similarity itself. One of the major efficiencies that has emerged from plant genome research to date is that a large percentage of higher plant genes can be assigned some degree of function by comparing them with the sequences of genes of known function.

[0076] Alternatively, “reverse genetics” is used to identify gene function. Large collections of insertion mutants are available for Arabidopsis, maize, petunia, and snapdragon. These collections can be screened for an insertional inactivation of any gene by using the polymerase chain reaction (PCR) primed with oligonucleotides based on the sequences of the target gene and the insertional mutagen. The presence of an insertion in the target gene is indicated by the presence of a PCR product. By multiplexing DNA samples, hundreds of thousands of lines can be screened and the corresponding mutant plants can be identified with relatively small effort. Analysis of the phenotype and other properties of the corresponding mutant will provide an insight into the function of the gene.

[0077] In one method of the invention, the gene function in a transgenic Arabidopsis plant is assessed with anti-sense constructs. A high degree of gene duplication is apparent in Arabidopsis, and many of the gene duplications in Arabidopsis are very tightly linked. Large numbers of transgenic Arabidopsis plants can be generated by infecting flowers with Agrobacterium tumefaciens containing an insertional mutagen, a method of gene silencing based on producing double-stranded RNA from bidirectional transcription of genes in transgenic plants can be broadly useful for high-throughput gene inactivation (Clough and Bent (1999) Plant J. 17; Waterhouse et al. (1998) Proc. Natl. Acad. Sci. U.S.A. 95:13959). This method may use promoters that are expressed in only a few cell types or at a particular developmental stage or in response to an external stimulus. This could significantly obviate problems associated with the lethality of some mutations.

[0078] Virus-induced gene silencing may also find use for suppressing gene function. This method exploits the fact that some or all plants have a surveillance system that can specifically recognize viral nucleic acids and mount a sequence-specific suppression of viral RNA accumulation. By inoculating plants with a recombinant virus containing part of a plant gene, it is possible to rapidly silence the endogenous plant gene.

[0079] Antisense nucleic acids are designed to specifically bind to RNA, resulting in the formation of RNA-DNA or RNA-RNA hybrids, with an arrest of DNA replication, reverse transcription or messenger RNA translation. Antisense nucleic acids based on a selected nucleic acid sequence can interfere with expression of the corresponding gene. Antisense nucleic acids are typically generated within the cell by expression from antisense constructs that contain the antisense strand as the transcribed strand. Antisense nucleic acids based on the disclosed nucleic acids will bind and/or interfere with the translation of mRNA comprising a sequence complementary to the antisense nucleic acid. The expression products of control cells and cells treated with the antisense construct are compared to detect the protein product of the gene corresponding to the nucleic acid upon which the antisense construct is based. The protein is isolated and identified using routine biochemical methods.

[0080] As an alternative method for identifying function of the gene corresponding to a nucleic acid disclosed herein, dominant negative mutations are readily generated for corresponding proteins that are active as homomultimers. A mutant polypeptide will interact with wild-type polypeptides (made from the other allele) and form a non-functional multimer. Thus, a mutation is in a substrate-binding domain, a catalytic domain, or a cellular localization domain. Preferably, the mutant polypeptide will be overproduced. Point mutations are made that have such an effect. In addition, fusion of different polypeptides of various lengths to the terminus of a protein can yield dominant negative mutants. General strategies are available for making dominant negative mutants (see for example, Herskowitz (1987) Nature 329:219). Such techniques can be used to create loss of function mutations, which are useful for determining protein function.

[0081] Another approach for discovering the function of genes utilizes gene chips and microarrays. DNA sequences representing all the genes in an organism can be placed on miniature solid supports and used as hybridization substrates to quantitate the expression of all the genes represented in a complex mRNA sample. This information is used to provide extensive databases of quantitative information about the degree to which each gene responds to pathogens, pests, drought, cold, salt, photoperiod, and other environmental variation. Similarly, one obtains extensive information about which genes respond to changes in developmental processes such as germination and flowering. One can therefore determine which genes respond to the phytohormones, growth regulators, safeners, herbicides, and related agrichemicals. These databases of gene expression information provide insights into the “pathways” of genes that control complex responses. The accumulation of DNA microarray or gene chip data from many different experiments creates a powerful opportunity to assign functional information to genes of otherwise unknown function. The conceptual basis of the approach is that genes that contribute to the same biological process will exhibit similar patterns of expression. Thus, by clustering genes based on the similarity of their relative levels of expression in response to diverse stimuli or developmental or environmental conditions, it is possible to assign functions to many genes based on the known function of other genes in the cluster.

### CONSTRUCTION OF POLYPEPTIDES OF THE INVENTION AND VARIANTS THEREOF

[0082] The polypeptides of the invention include those encoded by the disclosed nucleic acids. These polypeptides can also be encoded by nucleic acids that, by virtue of the degeneracy of the genetic code, are not identical in sequence to the disclosed nucleic acids. Thus, the invention includes within its scope a polypeptide encoded by a nucleic acid having the sequence of any one of SEQ ID NOS: 1-999 or a variant thereof.

[0083] In general, the term “polypeptide” as used herein refers to both the full length polypeptide encoded by the recited nucleic acid, the polypeptide encoded by the gene represented by the recited nucleic acid, as well as portions or fragments thereof. “Polypeptides” also includes variants of the naturally occurring proteins, where such variants are homologous or substantially similar to the naturally occurring protein, and can be of an origin of the same or different species as the naturally occurring protein. In general, variant polypeptides have a sequence that has at least about 80%, usually at least about 90%, and more usually at least about 98% sequence identity with a differentially expressed polypeptide of the invention, as measured by BLAST using the parameters described above. The variant polypeptides can be naturally or non-naturally glycosylated, i.e., the polypeptide has a glycosylation pattern that differs from the glycosylation pattern found in the corresponding naturally occurring protein.

[0084] In general, the polypeptides of the subject invention are provided in a non-naturally occurring environment, e.g. are separated from their naturally occurring environment. In certain embodiments, the subject protein is present in a composition that is enriched for the protein as compared to a control. As such, purified polypeptide is provided, where by purified is meant that the protein is present in a composition that is substantially free of non-differentially expressed polypeptides, where by substantially free is meant that less than 90%, usually less than 60% and more usually less than 50% of the composition is made up of non-differentially expressed polypeptides.

[0085] Also within the scope of the invention are variants; variants of polypeptides include mutants, fragments, and fusions. Mutants can include amino acid substitutions, additions or deletions. The amino acid substitutions can be conservative amino acid substitutions or substitutions to eliminate non-essential amino acids, such as to alter a glycosylation site, a phosphorylation site or an acetylation site, or to minimize misfolding by substitution or deletion of one or more cysteine residues that are not necessary for function. Conservative amino acid substitutions are those that preserve the general charge, hydrophobicity/hydrophilicity, and/or steric bulk of the amino acid substituted.

[0086] Variants also include fragments of the polypeptides disclosed herein, particularly biologically active fragments and/or fragments corresponding to functional domains. Fragments of interest will typically be at least about 10 amino acids (aa) to at least about 15 aa in length, usually at least about 50 aa in length, and can be as long as 300 aa in length or longer, but will usually not exceed about 1000 aa in length, where the fragment will have a stretch of amino acids that is identical to a polypeptide encoded by a nucleic acid having a sequence of any SEQ ID NOS:1-999, or a homolog thereof.

[0087] The protein variants described herein are encoded by nucleic acids that are within the scope of the invention. The genetic code can be used to select the appropriate codons to construct the corresponding variants.

### LIBRARIES AND ARRAYS

[0088] In general, a library of biopolymers is a collection of sequence information, which information is provided in either biochemical form (e.g., as a collection of nucleic acid or polypeptide molecules), or in electronic form (e.g., as a collection of genetic sequences stored in a computer-readable form, as in a computer system and/or as part of a computer program). The term biopolymer, as used herein, is intended to refer to polypeptides, nucleic acids, and derivatives thereof, which molecules are characterized by the possession of genetic sequences either corresponding to, or encoded by, the sequences set forth in the provided sequence list (seqlist). The sequence information can be used in a variety of ways, e.g., as a resource for gene discovery, as a representation of sequences expressed in a selected cell type, e.g. cell type markers, etc.

[0089] The nucleic acid libraries of the subject invention include sequence information of a plurality of nucleic acid sequences, where at least one of the nucleic acids has a sequence of any of SEQ ID NOS:1-999. By plurality is meant one or more, usually at least 2 and can include up to all of SEQ ID NOS:1-999. The length and number of nucleic acids in the library will vary with the nature of the library, e.g., if the library is an oligonucleotide array, a cDNA array, a computer database of the sequence information, etc.

[0090] Where the library is an electronic library, the nucleic acid sequence information can be present in a variety of media. “Media” refers to a manufacture, other than an isolated nucleic acid molecule, that contains the sequence information of the present invention. Such a manufacture provides the sequences or a subset thereof in a form that can be examined by means not directly applicable to the sequence as it exists in a nucleic acid. For example, the nucleotide sequence of the present invention, e.g. the nucleic acid sequences of any of the nucleic acids of SEQ ID NOS:1-999, can be recorded on computer readable media, e.g. any medium that can be read and accessed directly by a computer. Such media include, but are not limited to: magnetic storage media, such as a floppy disc, a hard disc storage medium, and a magnetic tape; optical storage media such as CD-ROM; electrical storage media such as RAM and ROM; and hybrids of these categories such as magnetic/optical storage media. One of skill in the art can readily appreciate how any of the presently known computer readable mediums can be used to create a manufacture comprising a recording of the present sequence information. Recorded refers to a process for storing information on computer readable medium, using any such methods as known in the art. Any convenient data storage structure can be chosen, based on the means used to access the stored information. A variety of data processor programs and formats can be used for storage, e.g. word processing text file, database format, etc. In addition to the sequence information, electronic versions of the libraries of the invention can be provided in conjunction or connection with other computer-readable information and/or other types of computer-readable files (e.g., searchable files, executable files, etc, including, but not limited to, for example, search program software, etc.)

[0091] By providing the nucleotide sequence in computer readable form, the information can be accessed for a variety of purposes. Computer software to access sequence information is publicly available. For example, the BLAST (Altschul et al., supra.) and BLAZE (Brutlag et al. Comp. Chem. (1993) 17:203) search algorithms on a Sybase system can be used identify open reading frames (ORFs) within the genome that contain homology to ORFs from other organisms.

[0092] As used herein, “a computer-based system” refers to the hardware means, software means, and data storage means used to analyze the nucleotide sequence information of the present invention. The minimum hardware of the computer-based systems of the present invention comprises a central processing unit (CPU), input means, output means, and data storage means. A skilled artisan can readily appreciate that any one of the currently available computer-based system are suitable for use in the present invention. The data storage means can comprise any manufacture comprising a recording of the present sequence information as described above, or a memory access means that can access such a manufacture.

[0093] “Search means” refers to one or more programs implemented on the computer-based system, to compare a target sequence or target structural motif with the stored sequence information. Search means are used to identify fragments or regions of the genome that match a particular target sequence or target motif. A variety of known algorithms are publicly known and commercially available, e.g. MacPattern (EMBL), BLASTN, BLASTX (NCBI) and tBLASTX. A “target sequence” can be any DNA or amino acid sequence of six or more nucleotides or two or more amino acids, preferably from about 10 to 100 amino acids or from about 30 to 300 nucleotide residues.

[0094] A “target structural motif,” or “target motif,” refers to any rationally selected sequence or combination of sequences in which the sequence(s) are chosen based on a three-dimensional configuration that is formed upon the folding of the target motif, or on consensus sequences of regulatory or active sites. There are a variety of target motifs known in the art. Protein target motifs include, but arc not limited to, enzyme active sites and signal sequences. Nucleic acid target motifs include, but are not limited to, hairpin structures, promoter sequences and other expression elements such as binding sites for transcription factors.

[0095] A variety of structural formats for the input and output means can be used to input and output the information in the computer-based systems of the present invention. One format for an output means ranks fragments of the genome possessing varying degrees of homology to a target sequence or target motif. Such presentation provides a skilled artisan with a ranking of sequences and identifies the degree of sequence similarity contained in the identified fragment.

[0096] A variety of comparing means can be used to compare a target sequence or target motif with the data storage means to identify sequence fragments of the genome. A skilled artisan can readily recognize that any one of the publicly available homology search programs can be used as the search means for the computer based systems of the present invention.

[0097] As discussed above, the “library” of the invention also encompasses biochemical libraries of the nucleic acids of SEQ ID NOS:1-999, e.g., collections of nucleic acids representing the provided nucleic acids. The biochemical libraries can take a variety of forms, e.g. a solution of cDNAs, a pattern of probe nucleic acids stably bound to a surface of a solid support (microarray) and the like. By array is meant an article of manufacture that has a solid support or substrate with one or more nucleic acid targets on one of its surfaces, where the number of distinct nucleic may be in the hundreds, thousand, or tens of thousands. Each nucleic acid will comprise at 18 nt and often at least 25 nt, and often at least 100 to 1000 nucleotides, and may represent up to a complete coding sequence or cDNA. A variety of different array formats have been developed and are known to those of skill in the art. The arrays of the subject invention find use in a variety of applications, including gene expression analysis, drug screening, mutation analysis and the like, as disclosed in the above-listed exemplary patent documents.

[0098] In addition to the above nucleic acid libraries, analogous libraries of polypeptides are also provided, where the where the polypeptides of the library will represent at least a portion of the polypeptides encoded by SEQ ID NOS:1-999.

### GENETICALLY ALTERED CELLS AND TRANSGENICS

[0099] The subject nucleic acids can be used to create genetically modified and transgenic organisms, usually plant cells and plants, which may be monocots or dicots. The term transgenic, as used herein, is defined as an organism into which an exogenous nucleic acid construct has been introduced, generally the exogenous sequences are stably maintained in the genome of the organism. Of particular interest are transgenic organisms where the genomic sequence of germ line cells has been stably altered by introduction of an exogenous construct.

[0100] Typically, the transgenic organism is altered in the genetic expression of the introduced nucleotide sequences as compared to the wild-type, or unaltered organism. For example, constructs that provide for over-expression of a targeted sequence, sometimes referred to as a “knock-in”, provide for increased levels of the gene product. Alternatively, expression of the targeted sequence can be down-regulated or substantially eliminated by introduction of a “knock-out” construct, which may direct transcription of an anti-sense RNA that blocks expression of the naturally occurring mRNA, by deletion of the genomic copy of the targeted sequence, etc.

[0101] In one method, large numbers of genes are simultaneously introduced in order to explore the genetic basis of complex traits, for example by making plant artificial chromosome (PLAC) libraries. The centromeres in Arabidopsis have been mapped and current genome sequencing efforts will extend through these regions. Because Arabidopsis telomeres are very similar to those in yeast one may use a hybrid sequence of alternating plant and yeast sequences that function in both types of organisms, developing yeast artificial chromosome-PLAC libraries, and then introducing them into a suitable plant host to evaluate the phenotypic consequences. By providing a defined chromosomal environment for cloned genes, the use of PLACs may also enhance the ability to produce transgenic plants with defined levels of gene expression.

[0102] It has been found in many organisms that there is significant redundancy in the representation of genes in a genome. That is, a particular gene function is likely by represented by multiple copies of similar coding sequences in the genome. These copies are typically conserved in the amino acid sequence, but may diverge in the sequence of non-translated sequences, and in their codon usage. In order to knock out a particular genetic function in an organism, it may not be sufficient to delete a genomic copy of a single gene. In such cases it may be preferable to achieve a genetic knock-out with an anti-sense construct, particularly where the sequence is aligned with the coding portion of the mRNA.

[0103] Methods of transforming plant cells are well-known in the art, and include protoplast transformation, tungsten whiskers (Coffee et al., U.S. Pat. No. 5,302,523, issued Apr. 12, 1994), directly by microorganisms with infectious plasmids, use of transposons (U.S. Pat. No. 5,792,294), infectious viruses, the use of liposomes, microinjection by mechanical or laser beam methods, by whole chromosomes or chromosome fragments, electroporation, silicon carbide fibers, and microprojectile bombardment.

[0104] For example, one may utilize the biolistic bombardment of meristem tissue, at a very early stage of development, and the selective enhancement of transgenic sectors toward genetic homogeneity, in cell layers that contribute to germline transmission. Biolistics-mediated production of fertile, transgenic maize is described in Gordon-Kamm et al. (1990), Plant Cell 2:603; Fromm et al. (1990) Bio/Technology 8: 833, for example. Alternatively, one may use a microorganism, including but not limited to, Agrobacterium tumefaciens as a vector for transforming the cells, particularly where the targeted plant is a dicotyledonous species. See, for example, U.S. Pat. No. 5,635,381. Leung et al. (1990) Curr. Genet. 17(5):409-11 describe integrative transformation of three fertile hermaphroditic strains of Arabidopsis thaliana using plasmids and cosmids that contain an E. coli gene linked to Aspergillus nidulans regulatory sequences.

[0105] Preferred expression cassettes for cereals may include promoters that are known to express exogenous DNAs in corn cells. For example, the Adhl promoter has been shown to be strongly expressed in callus tissue, root tips, and developing kernels in corn. Promoters that are used to express genes in corn include, but are not limited to, a plant promoter such as the, CaMV 35S promoter (Odell et al., Nature, 313, 810 (1985)), or others such as CaMV 19S (Lawton et al., Plant Mol. Biol., 9, 31F (1987)), nos (Ebert et al., PNAS USA, 84, 5745 (1987)), Adh (Walker et al., PNAS USA, 84, 6624 (1987)), sucrose synthase (Yang et al., PNAS USA, 87, 4144 (1990)), .alpha.-tubulin, ubiquitin, actin (Wang et al., Mol. Cell. Biol., 12, 3399 (1992)), cab (Sullivan et al., Mol. Gen. Genet, 215, 431 (1989)), PEPCase (Hudspeth et al., Plant Mol. Biol., 12, 579 (1989)), or those associated with the R gene complex (Chandler et al., The Plant Cell, 1, 1175 (1989)). Other promoters useful in the practice of the invention are known to those of skill in the art.

[0106] Tissue-specific promoters, including but not limited to, root-cell promoters (Conkling et al., Plant Physiol., 93, 1203 (1990)), and tissue-specific enhancers (Fromm et al., The Plant Cell, 1, 977 (1989)) are also contemplated to be particularly useful, as are inducible promoters such as water-stress-, ABA- and turgor-inducible promoters (Guerrero et al., Plant Molecular Biology, 15, 11-26)), and the like.

[0107] Regulating and/or limiting the expression in specific tissues may be functionally accomplished by introducing a constitutively expressed gene (all tissues) in combination with an antisense gene that is expressed only in those tissues where the gene product is not desired. Expression of an antisense transcript of this preselected DNA segment in an rice grain, using, for example, a zein promoter, would prevent accumulation of the gene product in seed. Hence the protein encoded by the preselected DNA would be present in all tissues except the kernel.

[0108] Alternatively, one may wish to obtain novel tissue-specific promoter sequences for use in accordance with the present invention. To achieve this, one may first isolate cDNA clones from the tissue concerned and identify those clones which are expressed specifically in that tissue, for example, using Northern blotting or DNA microarrays. Ideally, one would like to identify a gene that is not present in a high copy number, but which gene product is relatively abundant in specific tissues. The promoter and control elements of corresponding genomic clones may then be localized using the techniques of molecular biology known to those of skill in the art. Alternatively, promoter elements can be identified using enhancer traps based on T-DNA and/or transposon vector systems (see, for example, Campisi et al. (1999) Plant J. 17:699-707; Gu et al. (1998) Development 125:1509-1517).

[0109] In some embodiments of the present invention expression of a DNA segment in a transgenic plant will occur only in a certain time period during the development of the plant. Developmental timing is frequently correlated with tissue specific gene expression. For example, in corn expression of zein storage proteins is initiated in the endosperm about 15 days after pollination.

[0110] Ultimately, the most desirable DNA segments for introduction into a plant genome may be homologous genes or gene families which encode a desired trait (e.g., increased disease resistance) and which are introduced under the control of novel promoters or enhancers, etc., or perhaps even homologous or tissue-specific (e.g., root-, grain- or leaf-specific) promoters or control elements.

[0111] The genetically modified cells are screened for the presence of the introduced genetic material. The cells may be used in functional studies, drug screening, etc., e.g. to study chemical mode of action, to determine the effect of a candidate agent on pathogen growth, infection of plant cells, etc.

[0112] The modified cells are useful in the study of genetic function and regulation, for alteration of the cellular metabolism, and for screening compounds that may affect the biological function of the gene or gene product. For example, a series of small deletions and/or substitutions may be made in the hosts native gene to determine the role of different domains and motifs in the biological function. Specific constructs of interest include anti-sense, as previously described, which will reduce or abolish expression, expression of dominant negative mutations, and over-expression of genes.

[0113] Where a sequence is introduced, the introduced sequence may be either a complete or partial sequence of a gene native to the host, or may be a complete or partial sequence that is exogenous to the host organism, e.g., an A. thaliana sequence inserted into wheat plants. A detectable marker, such as aldA, lac Z, etc. may be introduced into the locus of interest, where upregulation of expression will result in an easily detected change in phenotype.

[0114] One may also provide for expression of the gene or variants thereof in cells or tissues where it is not normally expressed, at levels not normally present in such cells or tissues, or at abnormal times of development, during sporulation, etc. By providing expression of the protein in cells in which it is not normally produced, one can induce changes in cell behavior.

[0115] DNA constructs for homologous recombination will comprise at least a portion of the provided gene or of a gene native to the species of the host organism, wherein the gene has the desired genetic modification(s), and includes regions of homology to the target locus (see Kempin et al. (1997) Nature 389:802-803). DNA constructs for random integration or episomal maintenance need not include regions of homology to mediate recombination. Conveniently, markers for positive and negative selection are included. Methods for generating cells having targeted gene modifications through homologous recombination are known in the art.

[0116] Embodiments of the invention provide processes for enhancing or inhibiting synthesis of a protein in a plant by introducing a provided nucleic acids sequence into a plant cell, where the nucleic acid comprises sequences encoding a protein of interest. For example, enhanced resistance to pathogens may be achieved by inserting a nucleic acid encoding an activator in a vector downstream from a promoter sequence capable of driving constitutive high-level expression in a plant cell. When grown into plants, the transgenic plants exhibit increased synthesis of resistance proteins, and increased resistance to pathogens.

[0117] Other embodiments of the invention provide processes for enhancing or inhibiting synthesis of a tolerance factor in a plant by introducing a nucleic acid of the invention into a plant cell, where the nucleic acid comprises sequences encoding a tolerance factor. For example, enhanced tolerance to an environmental stress may be achieved by inserting a nucleic acid encoding an activator in a vector downstream from a promoter sequence capable of driving constitutive high-level expression in a plant cell. When grown into plants, the transgenic plants exhibit increased synthesis of tolerance proteins, and increased tolerance to environmental stress.

[0118] Factors which are involved, directly or indirectly in biosynthetic pathways whose products are of commercial, nutritional, or medicinal value include any factor, usually a protein or peptide, which regulates such a biosynthetic pathway (e.g., an activator or repressor); which is an intermediate in such a biosynthetic pathway; or which is a product that increases the nutritional value of a food product; a medicinal product; or any product of commercial value and/or research interest. Plant and other cells may be genetically modified to enhance a trait of interest, by upregulating or down-regulating factors in a biosynthetic pathway.

### SCREENING ASSAYS

[0119] The polypeptides encoded by the provided nucleic acid sequences, and cells genetically altered to express such sequences, are useful in a variety of screening assays to determine effect of candidate inhibitors, activators., or modifiers of the gene product. One may determine what insecticides, fungicides and the like have an enhancing or synergistic activity with a gene. Alternatively, one may screen for compounds that mimic the activity of the protein. Similarly, the effect of activating agents may be used to screen for compounds that mimic or enhance the activation of proteins. Candidate inhibitors of a particular gene product are screened by detecting decreased from the targeted gene product.

[0120] The screening assays may use purified target macromolecules to screen large compound libraries for inhibitory drugs; or the purified target molecule may be used for a rational drug design program, which requires first determining the structure of the macromolecular target or the structure of the macromolecular target in association with its customary substrate or ligand. This information is then used to design compounds which must be synthesized and tested further. Test results are used to refine the molecular models and drug design process in an iterative fashion until a lead compound emerges.

[0121] Drug screening may be performed using an in vitro model, a genetically altered cell, or purified protein. One can identify ligands or substrates that bind to, modulate or mimic the action of the target genetic sequence or its product. A wide variety of assays may be used for this purpose, including labeled in vitro protein-protein binding assays, electrophoretic mobility shift assays, immunoassays for protein binding, and the like. The purified protein may also be used for determination of three-dimensional crystal structure, which can be used for modeling intermolecular interactions.

[0122] Where the nucleic acid encodes a factor involved in a biosynthetic pathway, as described above, it may be desirable to identify factors, e.g., protein factors, which interact with such factors. One can identify interacting factors, ligands, substrates that bind to, modulate or mimic the action of the target genetic sequence or its product. A wide variety of assays may be used for this purpose, including labeled in vitro protein-protein binding assays, electrophoretic mobility shift assays, immunoassays for protein binding, and the like. In vivo assays for protein-protein interactions in E. coli and yeast cells are also well-established (see Hu et al. (2000) Methods 20:80-94; and Bai and Elledge (1997) Methods Enzymol. 283:141-156).

[0123] The purified protein may also be used for determination of three-dimensional crystal structure, which can be used for modeling intermolecular interactions. It may also be of interest to identify agents that modulate the interaction of a factor identified as described above with a factor encoded by a nucleic acid of the invention. Drug screening can be performed to identify such agents. For example, a labeled in vitro protein-protein binding assay can be used, which is conducted in the presence and absence of an agent being tested.

[0124] The term “agent” as used herein describes any molecule, e.g. protein or pharmaceutical, with the capability of altering or mimicking a physiological function. Generally a plurality of assay mixtures are run in parallel with different agent concentrations to obtain a differential response to the various concentrations. Typically, one of these concentrations serves as a negative control, i.e. at zero concentration or below the level of detection.

[0125] Candidate agents encompass numerous chemical classes, though typically they are organic molecules, preferably small organic compounds having a molecular weight of more than 50 and less than about 2,500 daltons. Candidate agents comprise functional groups necessary for structural interaction with proteins, particularly hydrogen bonding, and typically include at least an amine, carbonyl, hydroxyl or carboxyl group, preferably at least two of the functional chemical groups. The candidate agents often comprise cyclical carbon or heterocyclic structures and/or aromatic or polyaromatic structures substituted with one or more of the above functional groups. Candidate agents are also found among biomolecules including peptides, saccharides, fatty acids, steroids, purines, pyrimidines, derivatives, structural analogs or combinations thereof.

[0126] Candidate agents are obtained from a wide variety of sources including libraries of synthetic or natural compounds. For example, numerous means are available for random and directed synthesis of a wide variety of organic compounds and biomolecules, including expression of randomized oligonucleotides and oligopeptides. Alternatively, libraries of natural compounds in the form of bacterial, fungal, plant and organism extracts are available or readily produced. Additionally, natural or synthetically produced libraries and compounds are readily modified through conventional chemical, physical and biochemical means, and may be used to produce combinatorial libraries. Known pharmacological agents may be subjected to directed or random chemical modifications, such as acylation, alkylation, esterification, amidification, etc. to produce structural analogs.

[0127] Where the screening assay is a binding assay, one or more of the molecules may be joined to a label, where the label can directly or indirectly provide a detectable signal. Various labels include radioisotopes, fluorescers, chemiluminescers, enzymes, specific binding molecules, particles, e.g. magnetic particles, and the like. Specific binding molecules include pairs, such as biotin and streptavidin, digoxin and antidigoxin etc. For the specific binding members, the complementary member would normally be labeled with a molecule that provides for detection, in accordance with known procedures.

[0128] A variety of other reagents may be included in the screening assay. These include reagents like salts, neutral proteins, e.g. albumin, detergents, etc that are used to facilitate optimal protein-protein binding and/or reduce non-specific or background interactions. Reagents that improve the efficiency of the assay, such as protease inhibitors, nuclease inhibitors, anti-microbial agents, etc. may be used. The mixture of components are added in any order that provides for the requisite binding. Incubations are performed at any suitable temperature, typically between 4 and 40° C. Incubation periods are selected for optimum activity, but may also be optimized to facilitate rapid high-throughput screening. Typically between 0.1 and 1 hours will be sufficient.

[0129] The compounds having the desired biological activity may be administered in an acceptable carrier to a host. The active agents may be administered in a variety of ways. Depending upon the manner of introduction, the compounds may be formulated in a variety of ways. The concentration of therapeutically active compound in the formulation may vary from about 0.01-100 wt. %.

[0130] It must be noted that as used herein and in the appended claims, the singular forms “a”, “and”, and “the” include plural referents unless the context clearly dictates otherwise. Thus, for example, reference to “a complex” includes a plurality of such complexes and reference to “the formulation” includes reference to one or more formulations and equivalents thereof known to those skilled in the art, and so forth.

[0131] Unless defined otherwise, all technical and scientific terms used herein have the same meaning as commonly understood to one of ordinary skill in the art to which this invention belongs. Although any methods, devices and materials similar or equivalent to those described herein can be used in the practice or testing of the invention, the preferred methods, devices and materials are now described.

[0132] All publications mentioned herein are incorporated herein by reference for the purpose of describing and disclosing, for example, the methods and methodologies that are described in the publications which might be used in connection with the presently described invention. The publications discussed above and throughout the text are provided solely for their disclosure prior to the filing date of the present application. Nothing herein is to be construed as an admission that the inventors are not entitled to antedate such disclosure by virtue of prior invention.

[0133] The following examples are put forth so as to provide those of ordinary skill in the art with a complete disclosure and description of how to make and use the subject invention, and are not intended to limit the scope of what is regarded as the invention. Efforts have been made to ensure accuracy with respect to the numbers used (e.g. amounts, temperature, concentrations, etc.) but some experimental errors and deviations should be allowed for. Unless otherwise indicated, parts are parts by weight, molecular weight is average molecular weight, temperature is in degrees Celsius, and pressure is at or near atmospheric.

### EXPERIMENTAL

### Cloning and Characterization of Arabidopsis thaliana Genes.

[0134] Following DNA isolation, sequencing was performed using the Dye Primer Sequencing protocol, below. The sequencing reactions were loaded by hand onto a 48 lane ABI 377 and run on a 36 cm gel with the 36E-2400 run module and extraction. Gel analysis was performed with ABI software.

[0135] The Phred program was used to read the sequence trace from the ABI sequencer, call the bases and produce a sequence read and a quality score for each base call in the sequence., (Ewing et al. (1998) Genome Research 8:175-185; Ewing and Green (1998) Genome Research 8:186-194.) PolyPhred may be used to detect single nucleotide polymorphisms in sequences (Kwok et al. (1994) Genomics 25:615-622; Nickerson et al. (1997) Nucleic Acids Research 25(14):2745-2751.)

[0136] MicroWave Plasmid Protocol: Fill Beckman 96 deep-well growth blocks with 1 ml of TB containing 50 μg of ampicillin per ml. Inoculate each well with a colony picked with a toothpick or a 96-pin tool from a glycerol stock plate. Cover the blocks with a plastic lid and tape at two ends to hold lid in place. Incubate overnight (16-24 hours depending on the host stain) at 37° C. with shaking at 275 rpm in a New Brunswick platform shaker. Pellet cells by centrifugation for 20 minutes at 3250 rpm in a Beckman GS-R6K, decant TB and freeze pelleted cell in the 96 well block. Thaw blocks on the bench when ready to continue.

[0137] Prepare the MW-Tween20 solution

| For four blocks: | | | | For 16 blocks: |
|---|---|---|---|---|
| 50 | ml STET/TWEEN20 | | | 200 ml STET/TWEEN |
| 2 | tubes RNAse | (10 | mg/ml, 600 ulea) | 8 tubes RNAse |
| 1 | tube lysozyme | (25 | mg) | 4 tubes lysozyme |

[0138] Pipette RNAse and Lysozyme into the corner of a beaker. Add Tween 20 solution and swirl to mix completely. Use the Multidrop (or Biohit) to add 25 ul of sterile H₂O (from the L size autoclaved bottles) to each well. Resuspend the pellets by vortexing on setting 10 of the platform vortexer. Check pellets after 4 min. and repeat as necessary to resuspend completely. Use the multidrop to add 70 μl of the freshly prepared MW-Tween 20 solution to each well. Vortex at setting 6 on the platform vortex for 15 seconds. Do not cause frothing.

[0139] Incubate the blocks at room temperature for 5 min. Place two blocks at a time in the microwave (1000 Wafts) with the tape (placed on the H1 to H12 side of the block) facing away from each other and turn on at full power for 30 seconds. Rotate the blocks so that the tapes face towards each other and turn on at full power again for 30 seconds.

[0140] Immediately remove the blocks from the microwave and add 300 μl of sterile ice cold H₂O with the Multidrop. Seal the blocks with foil tape and place them in an H₂O/ice bath.

[0141] Vortex the blocks on 5 for 15 seconds and leave them in the H₂O/Ice bath. Return to step 7 until all the blocks are in the ice water bath. Incubate the blocks for 15 minutes on ice. Spin the blocks for 30 minutes in the Beckman GS-6KR with GH3.8 rotor with Microplus carrier at 3250 rpm.

[0142] Transfer 100 μl of the supernatant to Corning/Costar round bottom 96 well trays. Cover with foil and put into fridge if to be sequenced right away. If not to be sequenced in the next day, freeze them at −20° C.

[0143] Dye Primer Sequencing: Spin down the DP brew trays and DNA template by pulsing in the Beckman GS-6KR with GH3.8 rotor with Microplus carrier. Big Dye Primer reaction mix trays (one 96 well cycleplate (Robbins) for each nucleotide), 3 microliters of reaction mix per well.

[0144] Use twelve channel pipetter (Costar) to add 2 μl of template to one each G,A,T,C, trays for each template plate. Pulse again to get both the reaction mix and template into the bottom of the cycle plate and put them into the MJ Research DNA Tetrad (PTC-225).

[0145] Start program Dye-Primer. Dye-primer is:

[0146] 96° C., 1 min 1 cycle

[0147] 96° C., 10 sec.

[0148] 55° C., 5 sec.

[0149] 70° C., 1 min 15 cycles

[0150] 96° C., 10 sec.

[0151] 70° C., 1 min. 15 cycles

[0152] 4° C. soak

[0153] When done cycling, using the Robbins Hydra 290 add 100 μl of 100% ethanol to the A reaction cycle plate and pool the contents of all four cycle plates into the appropriate well.

[0154] To perform ethanol precipitation: Use Hydra program 4 to add 100 μl 100% ethanol to each A tray. Use Hydra program 5 to transfer the ethanol and therefore combine the samples from plate to plate. Once the G, A, T, and C trays of each block are mixed, spin for 30 minutes at 3250 in the Beckman. Pour off the ethanol with a firm shake and blot on a paper towel before drying in the speed vac (˜10 minutes or until dry). If ready to load add 3 μl dye and denature in the oven at 95° C. for ˜5 minutes and load 2 μl. If to store, cover with tape and store at −20° C.

[0155] Common Solutions

[0156] Terrific Broth

[0157] Per liter:

[0158] 900 ml H₂O

[0159] 12 g bacto tryptone

[0160] 24 g bacto-yeast extract

[0161] 4 ml glycerol

[0162] Shake until dissolved and then autoclave. Allow the solution to cool to 60° C. or less and then add 100 ml of sterile 0.17M KH₂PO₄, 0.72M K₂HPO₄ (in the hood w/sterile technique).

[0163] 0.17M KH₂PO₄, 0.72M K₂HPO₄

[0164] Dissolve 2.31 g of KH₂PO₄ and 12.54 g of K₂HPO₄ in 90 ml of H₂O.

[0165] Adjust volume to 100 ml with H₂O and autoclave.

[0166] Sequence loading Dye

[0167] 20 ml deionized formamide

[0168] 3.6 ml dH₂O

[0169] 400 pi 0.5M EDTA, pH 8.0

[0170] 0.2 g Blue Dextran

[0171] *Light sensitive, cover in foil or store in the dark.

[0172] STET/TWEEN

[0173] 10 ml 5M NaCl

[0174] 5 ml 1 M Tris, pH 8.0

[0175] 1 ml 0.5M EDTA., pH 8.0

[0176] 25 ml Tween20

[0177] Bring volume to 500 ml with H₂O

[0178] The sequencing reactions are run on an ABI 377 sequencer per manufacturer's' instructions. The sequencing information obtained each run are analyzed as follows.

[0179] Sequencing reads are screened for ribosomal., mitochondrial., chloroplast or human sequence contamination.. In good sequences, vector is marked by x's. These sequences go into biolims regardless of whether or not they pass the criteria for a ‘good’ sequence. This criteria is >=100 bases with phred score of >=20 and 15 of these bases adjacent to each other.

[0180] Sequencing reads that pass the criteria for good sequences are downloaded for assembly into consensus sequences (contigs). The program Phrap (copyrighted by Phil Green at University of Washington, Seattle, Wash.) utilizes both the Phred sequence information and the quality calls to assemble the sequencing reads. Parameters used with Phrap were determined empirically to minimize assembly of chimeric sequences and maximize differential detection of closely related members of gene families. The following parameters were used with the Phrap program to perform the assembly:

| | | |
|---|---|---|
| Penalty | −6 | Penalty for mismatches(substitutions) |
| Minmatch | 40 | Minimum length of matching sequence to use in |
| | | assembly of reads |
| Trim penalty | 0 | penalty used for identifying degenerate sequence at |
| | | beginning and end of read. |
| Minscore | 80 | Minimum alignment score |

[0181] Results from the Phrap analysis yield either contigs consisting of a consensus of two or more overlapping sequence reads, or singlets that are non-overlapping.

[0182] The contig and singlets assembly were further analyzed to eliminate low quality sequence utilizing a program to filter sequences based on quality scores generated by the Phred program. The threshold quality for “high quality” base calls is 20. Sequences with less than 50 contiguous high quality bases calls at the beginning of the sequence, and also at the end of the sequence were discarded. Additionally, the maximum allowable percentage of “low quality base calls in the final sequence is 2%, otherwise the sequence is discarded.

[0183] The stand-alone BLAST programs and Genbank databases were downloaded from NCBI for use on secure servers at the Paradigm Genetics, Inc. site. The sequences from the assembly were compared to the GenBank NR database downloaded from NCBI using the gapped version (2.0) of BLASTX. BLASTX translates the DNA sequence in all six reading frames and compares it to an amino acid database. Low complexity sequences are filtered in the query sequence. (Altschul et al. (1997) Nucleic Acids Res 25(17):3389-402).

[0184] Genbank sequences found in the BLASTX search with an E Value of less than 1e⁻¹⁰ are considered to be highly similar, and the Genbank definition lines were used to annotate the query sequences.

[0185] When no significantly similar sequences were found as a result of the BLASTX search, the query sequences were compared with the PROSITE database (Bairoch, A. (1992) PROSITE: A dictionary of sites and patterns in proteins. Nucleic Acids Research 20:2013-2018. ) to locate functional motifs.

[0186] Query sequences were first translated in six reading frames using the Wisconsin GCG pepdata program (Wisconsin Package Version 10.0, Genetics Computer Group (GCG) , Madison, Wis., USA. ). The Wisconsin GCG motifs program (Wisconsin Package Version 10.0, Genetics Computer Group (GCG), Madison, Wis., USA.) was used to locate motifs in the peptide sequence, with no mismatches allowed. Motif names from the PROSITE results were used to annotate these query sequences.

TABLE I

| SEQ | | |
|---|---|---|
| ID | Reference | Annotation |
| 1 | 2024001 | 1E-106 >gb\|AAD34616.1\|AF153284_1 (AF153284) |
| | | progesterone-binding protein homolog [Arabidopsis |
| | | thaliana] Length = 220 |
| 2 | 2024002 | Tyr_Phospho Site(56-63) |
| 3 | 2024003 | 5E-88 >pir\|\|A54809 disease resistance protein |
| | | RPS2 - Arabidopsis thaliana >gi\|548086 (U14158) |
| | | RPS2 [Arabidopsis thaliana] >gi\|549979 (U12860) |
| | | RPS2 Arabidopsis thali- |
| | | ana]>gi\|4538938\|emb\|CAB39674.1\| (AL049483) |
| | | disease |
| 4 | 2024004 | 7E-81 ) >sp\|P25069\|CAL2_ARATH CALMO- |
| | | DULIN-2/3/5 >gi\|99671\|pir\|\|S22503 calmodulin - |
| | | Arabidopsis thaliana >gi\|1076437\|pir\|\|S53006 |
| | | calmodulin - leaf mustard >gi\|2146726\|pir\|\|S71513 |
| | | calmodulin - Arabidopsis thaliana >gi\|166651 |
| | | (M38380) calmodulin-2 Arabidopsis thali- |
| | | ana] >gi\|166653 (M73711) calmodulin-3 [Arabidopsis |
| | | thaliana] >gi\|474183\|emb\|CAA47690\| |
| | | (X67273) calmodulin Arabidopsis thali- |
| | | ana] >gi\|497992 (U10150) calmodulin [Brassica |
| | | napus] >gi\|899058 (M88307) calmodulin [Brassica |
| | | juncea] >gi\|1183005\|dbj\|BAA082831 (D45848) |
| | | calmodulin [Arabidopsis thaliana] >gi\|3402706 |
| | | (AC004261) unknown protein Arabidopsis thali- |
| | | ana] >gi\|3885333 (AC005623) calmodulin |
| | | [Arabidopsis thaliana] >gi\|228407\|prf\|\|1803520A |
| | | calmodulin 2 [Arabidopsis thaliana] Length = 149 |
| 5 | 2024005 | 1E-116 >pir\|\|S28426 ubiquitin precursor - |
| | | wild oat >gi\|15989\|emb\|CAA49200\| (X69422) |
| | | tetraubiquitin [Avena fatua] >gi\|777758 |
| | | (L41658) polyubiguitin [Saccharum sp.] Length = 305 |
| 6 | 2024006 | 6E-77 >sp\|P42699\|D112_ARATH DNA- |
| | | DAMAGE-REPAIR/TOLERATION PROTEIN |
| | | DRT112 PRECURSOR >gi\|421830\|pir\|\|S33707 |
| | | DRT112 protein - Arabidopsis thaliana >gi\|166696 |
| | | (M98456) DRT112 [Arabidopsis thaliana] |
| | | Length = 167 |
| 7 | 2024007 | Zinc_Finger_C3hc4(1162-1171) |
| 8 | 2024008 | Rgd(1473-1475) |
| 9 | 2024009 | 4E-65 >dbj\|BAA84370.1\| (AP000423) |
| | | ATPase alpha subunit [Arabidopsis thaliana] |
| | | Length = 507 |
| 10 | 2024010 | Tyr_Phospho_Site(658-664) |
| 11 | 2024011 | Tyr_Phospho_Site(1191-1198) |
| 12 | 2024012 | Tyr_Phospho_Site(1122-1128) |
| 13 | 2024013 | IE-137 >dbj\|BAA84375.1\| (AP000423) |
| | | RNA polymerase beta' subunit-2 |
| | | [Arabidopsis thaliana] Length = 1376 |
| 14 | 2024014 | Tyr_Phospho_Site(1352-1360) |
| 15 | 2024015 | 4E-98 >gb\|AAD15512\| (AC006439) |
| | | Reri protein [Arabidopsis thaliana] Length = 566 |
| 16 | 2024016 | 1E-116 >emb\|CAB38949.1\| (AL049171) |
| | | 1-aminocyclopropane-1-carboxylate synthase-like |
| | | protein [Arabidopsis thaliana] Length = 447 |
| 17 | 2024017 | 2E-78 >sp\|P25070\|TCH2_ARATH CAL- |
| | | MODULIN-RELATED PROTEIN 2, TOUCH-IN- |
| | | DUCED >gi\|2583169 (AF026473) calmodulin-related |
| | | protein [Arabidopsis thaliana] Length = 161 |
| 18 | 2024018 | Tyr_Phospho_Site(193-199) |
| 19 | 2024019 | Tyr_Phospho_Site(879-886) |
| 20 | 2024020 | 7E-50 >emb\|CAA74401.1\| (Y14072) |
| | | HMG protein [Arabidopsis thaliana] |
| | | Length = 144 |
| 21 | 2024021 | Tyr_Phospho_Site(940-947) |
| 22 | 2024022 | 1E-110 >prf\|\|1804333C Gin synthetase [Arabidopsis |
| | | thaliana] Length = 430 |
| 23 | 2024023 | 2E-85 >sp\|P35133\|UBCA_ARATH UBIQUITIN- |
| | | CONJUGATING ENZYME E2-17 KD 10 |
| | | (UBIQUITIN-PROTEIN LIGASE 10) |
| | | (UBIQUITIN CARRIER PROTEIN |
| | | 10) >gi\|421858\|pir\|\|S32672 ubiquitin—protein |
| | | ligase (EC 6.3.2.19) UBC10 - Arabidopsis thali- |
| | | ana >gi\|297878\|emb\|CAA78715\| (Z14991) ubiquitin |
| | | conjugating enzyme [Arabidopsis thali- |
| | | ana] >gi\|349213 (L00640) ubiquitin conjugating |
| | | enzyme [Arabidopsis thaliana] Length = 148 |
| 24 | 2024024 | 3E-29 >sp\|Q96286\|DCAM_ARATH S-ADEN- |
| | | OSYLMETHIONINE DECARBOXYLASE |
| | | PROENZYME (ADOMETDC) |
| | | (SAMDC) >gi\|1531763\|emb\|CAA69073\| (Y07765) |
| | | s-adenosylmethionine decarboxylase |
| | | [Arabidopsis thaliana] Length = 366 |
| 25 | 2024025 | Tyr_Phospho_Site(561-569) |
| 26 | 2024026 | Tyr_Phospho_Site(1000-1007) |
| 27 | 2024027 | 3E-94 >emb\|CAB41856.1\| (AL049746) |
| | | ABC-type transport-like protein |
| | | [Arabidopsis thaliana] Length = 1011 |
| 28 | 2024028 | 1E-112 >sp\|P43082\|HEVL_ARATH HEVEIN- |
| | | LIKE PROTEIN PRECURSOR >gi\|407248 |
| | | (U01880) pre-hevein-like protein Arabidopsis thali- |
| | | ana] >gi\|6175186\|gb\|AAF04912.1\|AC011437_27 |
| | | (AC011437) hevein-like protein |
| | | precursor [Arabidopsis thaliana] |
| 29 | 2024029 | 8E-98 >gi\|3242705 (AC003040) |
| | | nicotinate phosphoribosyltransferase |
| | | [Arabidopsis thaliana] Length = 574 |
| 30 | 2024030 | Tyr_Phospho_Site(853-860) |
| 31 | 2024031 | 1E-115 >gi\|2281083 (AC002333) |
| | | polygalacturonase isolog [Arabidopsis |
| | | thaliana] Length = 384 |
| 32 | 2024032 | Pkc_Phospho_Site(27-29) |
| 33 | 2024033 | 4E-28 >sp\|P16970\|PMP7_RAT 70 |
| | | KD PEROXISOMAL MEMBRANE PROTEIN |
| | | (PMP70) >gi\|111319\|pir\|\|A35723 70K |
| | | peroxisomal membrane protein - |
| | | rat >gi\|220862\|dbj BAA14086\| (D90038) |
| | | PMP70 [Rattus norvegicus] Length = 659 |
| 34 | 2024034 | 2E-19 >gi\|3249088 (AC004473) |
| | | Contains similarity to goliath protein |
| | | gb\|M97204 from D. melanogster. [Arabidopsis |
| | | thaliana] Length = 327 |
| 35 | 2024035 | 2E-13 >pir\|fJN0673 ubiquitin-like |
| | | fusion protein An1a - African clawed frog |
| | | Length = 693 |
| 36 | 2024036 | Tyr_Phospho_Site(554-562) |
| 37 | 2024037 | 1E-10 >gb\|AAD25756.1\|AC007060_14 (AC007060) |
| | | Contains the PF\|00650 CRAL/TRIO phosphatidyl- |
| | | inositol-transfer protein domain. ESTs gb\|T76582, |
| | | gb\|N06574 and gb\|Z25700 come from this gene. |
| | | [Arabidopsis thaliana] Length = 540 |
| 38 | 2024038 | 1E-30 >gb\|AAD25756.1\|AC007060_14 (AC007060) |
| | | Contains the PF\|00650 CRAL/TRIO phosphatidyl- |
| | | inositol-transfer protein domain. ESTs gb\|T76582, |
| | | gb\|N06574 and gb\|Z25700 come from this gene. |
| | | [Arabidopsis thaliana] Length = 540 |
| 39 | 2024039 | IE-101 >gb\|AAD32870.1\|AC005489_8 (AC005489) |
| | | F14N23.8 [Arabidopsis thaliana] Length = 223 |
| 40 | 2024040 | 3E-34 >gb\|AAD17415\| (AC006248) |
| | | serine/threonine kinase [Arabidopsis |
| | | thaliana] Length = 365 |
| 41 | 2024041 | 1E-74 >sp\|Q08112\|RS15_ARATH 40S |
| | | RIBOSOMAL PROTEIN S15 >gi\|629556\|pir\|\|S43412 |
| | | ribosomal protein S15 - Arabidopsis thali- |
| | | ana >gi\|313152\|emb\|CAA80679\| (Z23161) ribosomal |
| | | protein S15 [Arabidopsis |
| | | thaliana] >gi\|313188\|emb\|CAA80681\| (Z23162) |
| | | ribosomal protein S15 [Arabidopsis |
| | | thaliana] >gi\|1903366\|gb\|AAB70449\| (AC000104) |
| | | Strong similarity to Oryza 40S ribosomal protein S15. |
| | | ESTs gb\|R29788,gb\|ATTS0365 come from this |
| | | gene. [Arabidopsis thaliana] Length = 152 |
| 42 | 2024042 | Tyr_Phospho_Site(1144-1151) |
| 43 | 2024043 | 2E-70 >sp\|Q05091\|PGIP_PYRCO POLY- |
| | | GALACTURONASE INHIBITOR PRECURSOR |
| | | (POLYGALACTURONASE-INHIBITING PROTEIN) |
| | | >gi\|543660\|pir\|\|JQ2262 Polygalacturonase inhibitor |
| | | precursor - Pyrus communis >gi\|169684 (L09264) |
| | | polygalacturonase inhibitor [Pyrus communis] |
| | | Length = 330 |
| 44 | 2024044 | 2E-73 >gi\|3201969 (AF068332) |
| | | submergence induced protein 2A [Oryza |
| | | sativa] Length = 198 |
| 45 | 2024045 | 1E-108 >emb\|CAB41167.1\| (AL049659) |
| | | cytochrome P450-like protein [Arabidopsis thaliana] |
| | | Length = 490 |
| 46 | 2024046 | 1E-92 >emb\|CAA66959\| (X98315) peroxidase |
| | | [Arabidopsis thaliana] >gi\|1429221\|emb\|CAA67313\| |
| | | (X98777) peroxidase ATP16a [Arabidopsis |
| | | thaliana] >gi\|4455802\|emb\|CAB37193\| (AJ133036) |
| | | peroxidase [Arabidopsis thaliana] Length = 352 |
| 47 | 2024047 | 4E-31 >sp\|P25070\|TCH2_ARATH CAL- |
| | | MODULIN-RELATED PROTEIN 2, TOUCH- |
| | | INDUCED >gi\|2583169 (AF026473) calmodulin-related |
| | | protein [Arabidopsis thaliana] Length = 161 |
| 48 | 2024048 | 2E-93 >sp\|Q43291\|RL2I_ARATH 60S |
| | | RIBOSOMAL PROTEIN L21 >gi\|2160162 |
| | | (AC000132) Similar to ribosomal protein L21 |
| | | (gb\|L38826). ESTs gb\|AA395597,gb\|ATTS5197 come |
| | | from this gene. [Arabidopsis thaliana] >gi\|3482935 |
| | | (AC003970) ribosomal protein L21 [Arabidopsis thaliana] |
| | | Length = 164 |
| 49 | 2024049 | Tyr_Phospho_Site(102-108) |
| 50 | 2024050 | Tyr_Phospho_Site(605-612) |
| 51 | 2024051 | 1E-116 ) >gi\|3885328 (AC005623) |
| | | serine/threonine protein kinase |
| | | [Arabidopsis thaliana] Length = 441 |
| 52 | 2024052 | Pkc_Phospho_Site(29-31) |
| 53 | 2024053 | Tyr_Phospho_Site(2-9) |
| 54 | 2024054 | 1E-90 ) >emb\|CAA10457.1\| (AJ131580) |
| | | glutathione transferase AtGST 10 |
| | | [Arabidopsis thaliana] Length = 245 |
| 55 | 2024055 | 2E-33 >ref\|NP_002003.1\|PFHIT\| fragile histidine |
| | | triad gene >gi\|1706794\|sp\|P49789\|FHIT_HUMAN |
| | | BIS(5′-ADENOSYL)-TRIPHOSPHATASE |
| | | (DIADENOSINE 5′, 5″″-P1,P3-TRIPHOSPHATE |
| | | HYDROLASE) (DINUCLEOSIDETRIPHOSPHA- |
| | | TASE) (AP3A HYDROLASE) (AP3AASE) |
| | | (FRAGILE HISTIDINE TRIAD |
| | | PROTEIN) >gi\|3114520\|pdb\| |
| 56 | 2024056 | Tyr_Phospho_Site(631-637) |
| 57 | 2024057 | Tyr_Phospho_Site(659-666) |
| 58 | 2024058 | Tyr_Phospho_Site(576-582) |
| 59 | 2024059 | 1E-100 >gi\|3176874 (AF065639) |
| | | cucumisin-like serine protease |
| | | [Arabidopsis thaliana] Length = 757 |
| 60 | 2024060 | 1E-39 >gb\|AAD23390.1\|AF109733_1 |
| | | (AF109733) SWI/SNF-related, matrix-associated, |
| | | actin-dependent regulator of chromatin D1 |
| | | [Homo sapiens] Length = 453 |
| 61 | 2024061 | Pkc_Phospho_Site(108-110) |
| 62 | 2024062 | Tyr_Phospho_Site(223-230) |
| 63 | 2024063 | Tyr_Phospho_Site(712-719) |
| 64 | 2024064 | 7E-87 >gi\|3643604 (AC005395) |
| | | receptor-like protein kinase [Arabidopsis |
| | | thaliana] Length = 960 |
| 65 | 2024065 | 2E-24 >ref\|NP_006317.1\|PN\|FIE14\| seven transmem- |
| | | brane domain protein >gi\|3550427\|emb\|CAA77013\| |
| | | (Y18007) seven transmembrane domain protein |
| | | [Homo sapiens] Length = 224 |
| 66 | 2024066 | Tyr_Phospho_Site(124-130) |
| 67 | 2024067 | 1E-106 ) >gi\|2353175 (AF015544) |
| | | sigma factor 3 Arabidopsis thali- |
| | | ana] >gi\|2463554\|dbj\|BAA22530\| (D89994) SigC |
| | | [Arabidopsis thaliana] >gi\|5478585\|dbj\|BAA82450.1\| |
| | | (AB019944) sigma factor SigC [Arabidopsis |
| | | thaliana] Length = 571 |
| 68 | 2024068 | Tyr_Phospho_Site(760-766) |
| 69 | 2024069 | 1E-49 >emb\|CAB45546.1\| (AJ007014) |
| | | AMMECR1 protein [Homo |
| | | sapiens] >gi\|6063688\|emb\|CAB58122.1\| |
| | | (AJ012221) AMMECRi [Homo sapiens] Length = 333 |
| 70 | 2024070 | 1E-111 >emb\|CAA16556\| (AL021635) |
| | | cytochrome P450 - like protein [Arabidopsis thaliana] |
| | | Length = 526 |
| 71 | 2024071 | 2E-69 >gb\|AAD40132.1\|AF149413_13 (AF149413) |
| | | contains similarity to arabinosidase [Arabidopsis |
| | | thaliana] Length = 521 |
| 72 | 2024072 | 5E-35 >gi\|556409 (L34551) transcriptional |
| | | activator protein [Oryza sativa] Length = 298 |
| 73 | 2024073 | Tyr_Phospho_Site(81 8-825) |
| 74 | 2024074 | SE-13 >dbj\|BAA84689.1\| (AB025218) |
| | | Sid394p [Mus musculus] Length = 201 |
| 75 | 2024075 | 3E-94 >gb\|AAD55640.1\|AC008017_13 (AC008017) |
| | | Similar to downy mildew resistance protein RPP5 |
| | | [Arabidopsis thaliana] Length = 176 |
| 76 | 2024076 | 9E-82 ) >emb\|CAA18722.1\| (AL022603) |
| | | NADPH quinone oxidoreductase [Arabidopsis |
| | | thaliana] >gi\|4455266\|emb\|CAB36802.1\| |
| | | (AL035527) NADPH guinone oxidoreductase |
| | | [Arabidopsis thaliana] Length = 325 |
| 77 | 2024077 | 4E-87 >emb\|CAA10060.1\| (AJ012571) |
| | | glutathione transferase [Arabidopsis |
| | | thaliana] Length = 219 |
| 78 | 2024078 | Rnp_1(214-221) |
| 79 | 2024079 | 7E-19 >gb\|AAD23884.1\|AC006954_5 (AC006954) |
| | | glucosyltransferase [Arabidopsis thaliana] |
| | | Length = 690 |
| 80 | 2024080 | Tyr_Phospho_Site(1175-1182) |
| 81 | 2024081 | Rgd(310-312) |
| 82 | 2024082 | 8E-79 >emb\|CAA72093\| (Y11210) |
| | | uracil phosphoribosyltransferase |
| | | [Nicotiana tabacum] Length = 224 |
| 83 | 2024083 | 3E-23 >emb\|CAB10416.1\| (Z97341) salt-inducible |
| | | protein homolog [Arabidopsis thaliana] |
| | | Length = 777 |
| 84 | 2024084 | Tyr_Phospho_Site(819-825) |
| 85 | 2024085 | 1E-126 >gb\|AAB53101.2\| (U68219) |
| | | catalase [Brassica napus] Length = 492 |
| 86 | 2024086 | Tyr_Phospho_Site(35-43) |
| 87 | 2024087 | 1E-100 >sp\|O23627\|SYG_ARATH GLYCYL- |
| | | TRNA SYNTHETASE (GLYCINE—TRNA |
| | | LIGASE) (GLYRS) >gi\|2564215\|emb\|CAA051621\| |
| | | (AJ002062) glycyl-tRNA synthetase [Arabidopsis |
| | | thaliana] Length = 729 |
| 88 | 2024088 | Pkc_Phospho_Site(122-124) |
| 89 | 2024089 | 2E-11 >gi\|3004821 (AF024691) |
| | | inorganic phosphate cotransporter |
| | | [Drosophila ananassae] Length = 483 |
| 90 | 2024090 | 5E-15 >gi\|707021 (U78721) |
| | | Ubiquitin-conjugating enzyme, E2-16kD isolog |
| | | [Arabidopsis thaliana] Length = 182 |
| 91 | 2024091 | 1E-113 >gi\|2384675 (AF012659) |
| | | potassium transporter AtKT4p |
| | | [Arabidopsis thaliana] Length = 273 |
| 92 | 2024092 | 4E-67 >gb\|AAD20169\| (AC006418) |
| | | zinc finger protein [Arabidopsis |
| | | thaliana] Length = 356 |
| 93 | 2024093 | 2E-89 >emb\|CAA65504∩ (X96728) |
| | | isocitrate dehydrogenase (NADP+) |
| | | [Nicotiana tabacum] Length = 470 |
| 94 | 2024094 | Tyr_Phospho_Site(2-10) |
| 95 | 2024095 | 5E-88 >emb\|CAA09728.1\| (AJ011669) |
| | | MYB96 protein [Arabidopsis thaliana] |
| | | Length = 343 |
| 96 | 2024096 | Pkc_Phospho_Site(38-40) |
| 97 | 2024097 | 2E-79 ) >gi\|2289010 (AC002335) |
| | | FKBP type peptidyl-prolyl cis-trans isomerase |
| | | isolog [Arabidopsis thaliana] Length = 167 |
| 98 | 2024098 | Pkc_Phospho_Site(79-81) |
| 99 | 2024099 | 3E-89 >gi\|1871194 (U90439) DNA |
| | | binding protein isolog [Arabidopsis |
| | | thaliana] >gi\|2335092 (AC002339) DNA binding |
| | | protein [Arabidopsis thaliana] |
| | | Length = 274 |
| 100 | 2024100 | 2E-49 >emb\|CAA07566\| (AJ007578) |
| | | pRIBS protein [Ribes nigrum] Length = 258 |
| 101 | 2024101 | 1E-64 >sp\|P15458\|2SS2_ARATH 2S SEED |
| | | STORAGE PROTEIN 2 PRECURSOR (2S |
| | | ALBUMIN STORAGE |
| | | PROTEIN) >gi\|68854\|pir\|\|NWMU2 2S albumin 2 |
| | | precursor - Arabidopsis thaliana >gi\|166615 (M22033) |
| | | albumin 2S subunit 2 precursor [Arabidopsis |
| | | thaliana] >gi\|395205\|emb\|CAA80871\| (Z24745) |
| | | 2S albumin isoform 2 [Arabidopsis |
| | | thaliana] >gi\|4490711\|emb\|CAB38845.1\| |
| | | (AL035680) NWMU2-25 albumin 2 precursor |
| | | [Arabidopsis thaliana] Length = 170 |
| 102 | 2024102 | 2E-26 >gb\|AAB01563.1\| (L47115) late |
| | | embryogenesis abundant protein |
| | | [Picea glauca] Length = 197 |
| 103 | 2024103 | Receptor_Cytokines_1(1172-1184) |
| 104 | 2024104 | 1E-106 ) >emb\|CAB41139.1\| (AL049658) |
| | | aldehyde dehydrogenase (NAD+)-like protein |
| | | [Arabidopsis thaliana] Length = 538 |
| 105 | 2024105 | 1E-144 ) >gb\|AAD25783.1\|AC00657_19 (AC006577) |
| | | Strong similarity to gb\|S77096 aldehyde |
| | | dehydrogenase homolog from Brassica napus and is a |
| | | member of PF\|00171 Aldehyde dehydrogenase family. |
| | | ESTs gb\|T46213, gb\|T42164, gb\|T43682, |
| | | gb\|N96380, gb\|T42973, gb... Length = 508 |
| 106 | 2024106 | 3E-21 >dbj\|BAA19751\| (D85339) |
| | | hydroxypyruvate reductase [Arabidopsis |
| | | thaliana] Length = 386 |
| 107 | 2024107 | Tyr_Phospho_Site(1123-1131) |
| 108 | 2024108 | Pkc_Phospho_Site(223-225) |
| 109 | 2024109 | 4E-86 >sp\|P25864\|RK9_ARATH 50S |
| | | RIBOSOMAL PROTEIN L9, CHLOROPLAST |
| | | PRECURSOR (CL9) >gi\|7l257\|pir\|\|R5MUL9 |
| | | ribosomal protein L9 precursor, chloroplast - |
| | | Arabidopsis thaliana >gi\|16499\|emb\|CAA77480\| |
| | | (Z11129) plastid ribosomal protein CL9 [Arabidopsis |
| | | thaliana] >gi\|16501\|emb\|CAA77594\| (Z11509) |
| | | Chloroplast ribosomal protein CL9 |
| | | [Arabidopsis thaliana] Length = 197 |
| 110 | 2024110 | 2E-84 ) >gb\|AAD23027.1\|AC006585_22 (AC006585) |
| | | tyrosine transaminase |
| | | [Arabidopsis thaliana] Length = 445 |
| 111 | 2024111 | 7E-30 >emb\|CAA16677\| (AL021684) |
| | | LRR-like protein [Arabidopsis |
| | | thaliana] Length = 445 |
| 112 | 2024112 | Pkc_Phospho_Site(35-37) |
| 113 | 2024113 | Rgd(1356-1358) |
| 114 | 2024114 | Pkc_Phospho_Site(40-42) |
| 115 | 2024115 | 2E-75 >sp\|Q08112\|RS15_ARATH 40S |
| | | RIBOSOMAL PROTEIN S15 >gi\|629556\|pir\|\|S43412 |
| | | ribosomal protein S15 - Arabidopsis |
| | | thaliana >gi\|313152\|emb\|CAA8O679\| (Z23161) |
| | | ribosomal protein S15 [Arabidopsis |
| | | thaliana] >gi\|313188\|emb\|CAA8O681\| (Z23162) |
| | | ribosomal protein S15 [Arabidopsis |
| | | thaliana] >gi\|1903366\|gb\|AAB70449\| (AC000104) |
| | | Strong similarity to Oryza 40S ribosomal protein S15. |
| | | ESTs gb\|R29788,gb\|ATTS0365 come from this |
| | | gene. [Arabidopsis thaliana] Length = 152 |
| 116 | 2024116 | Tyr_Phospho_Site(728-735) |
| 117 | 2024117 | 1E-78 >sp″O23255\|SAHH_ARATH ADEN- |
| | | OSYLHOMOCYSTEINASE (S-ADENOSYL-L- |
| | | HOMOCYSTEINE HYDROLASE) |
| | | (ADOHCYASE) >gi\|2244750\|emb\|CAB10173.1\| |
| | | (Z97335) adenosylhomocysteinase [Arabidopsis |
| | | thaliana] >gi\|3088579\|gb\|AAC14714.1\| |
| | | (AF059581) S-adenosyl-L-homocysteine hydrolase |
| | | [Arabidopsis thaliana] Length = 485 |
| 118 | 2024118 | 3E-45 >emb\|CAB39S95.1\| (AL049480) |
| | | ribosomal protein S10 [Arabidopsis |
| | | thaliana] Length = 177 |
| 119 | 2024119 | Tyr_Phospho_Site(759-767) |
| 120 | 2024120 | 1E-99 >pir\|\|S71168 envelope |
| | | Ca2+-ATPase precursor - Arabidopsis |
| | | thaliana >gi\|471089\|dbj\|BAA03091\| (D13984) |
| | | chloroplast envelope Ca2+-ATPase precursor [Ara- |
| | | bidopsis thaliana] >gi\|4165448\|emb\|CAA49558\| |
| | | (X69940) envelope Ca2+-ATPase [Arabidopsis |
| | | thaliana] Length = 946 |
| 121 | 2024121 | 8E-11 >sp\|Q43111\|PME3_PHAVU PECTI- |
| | | NESTERASE 3 PRECURSOR (PECTIN METHYL- |
| | | ESTERASE 3) (PE 3) >gi\|1076515\|pir\|\|S53105 |
| | | pectinesterase precursor - kidney |
| | | bean >gi\|732913\|emb\|CAA59482\| (X85216) |
| | | pectinesterase [Phaseolus vulgaris] Length = 581 |
| 122 | 2024122 | 1E-31 >ref\|NP_005827.1\|PUK114\| translational |
| | | inhibitor protein |
| | | p14.5 >gi\|1717975\|sp\|P52758\|UK14_HUMAN 14.5 |
| | | KD TRANSLATIONAL INHIBITOR |
| | | PROTEIN (P14.5) (UK114 ANTIGEN |
| | | HOMOLOG) >gi\|1177435\|emb\|CAA64670\| |
| | | (X95384) 14.5 kDa translational inhibitor protein, |
| | | p14.5 [Homo sapiens] Length = 1 |
| 123 | 2024123 | 1E-100 ) >sp\|P41377\|IF42_ARATH |
| | | EUKARYOTIC INITIATION FACTOR 4A-2 |
| | | (EIF-4A-2) >gi\|322504\|pir\|\|JC1453 translation |
| | | initiation factor elF-4A2 - Arabidopsis |
| | | thaliana >gi\|16556\|emb\|CAA46189\| (X65053) |
| | | eukaryotic translation initiation f |
| 124 | 2024124 | Tyr_Phospho_Site(676-682) |
| 125 | 2024125 | 2E-53 >gb\|AAD51854.1\|AF178990_1 (AF178990) |
| | | stress related protein [Vitis |
| | | niparia] Length = 248 |
| 126 | 2024126 | 6E-73 ) >sp\|Q42418\|PRO2_ARATH PROFILIN |
| | | 2 >gi\|1353766 (U43323) profilin 2 [Arabidopsis |
| | | thaliana] >gi\|1353772 (U43326) profilin 2 |
| | | [Arabidopsis thaliana] Length = 131 |
| 127 | 2024127 | 9E-82 >pir\|1558500 auxin-induced protein IAA9 - |
| | | Arabidopsis thaliana Length = 338 |
| 128 | 2024128 | 1E-98 >dbj\|BAA77603.1\| (AB027002) |
| | | plastidic aldolase [Nicotiana |
| | | paniculata] Length = 398 |
| 129 | 2024129 | 1E-19 >ref\|NP_006275.1\|PTAF2H\| TATA |
| | | box binding protein (TBP)-associated factor, RNA |
| | | polymerase II, H, |
| | | 30kD >gi\|3024688\|sp\|Q12962\|T2D8 HUMAN |
| | | TRANSCRIPTION INITIATION FACTOR |
| | | TFIID 30 KD SUBUNIT (TAFII-30) |
| | | (TAFII30) >gi\|627645\|pir\| |
| 130 | 2024130 | Tyr_Phospho_Site(699-706) |
| 131 | 2024131 | Tyr_Phospho_Site(394-401) |
| 132 | 2024132 | 3E-88 >emb\|CAA74696.1\| (Y14316) |
| | | MAP3K gamma protein kinase |
| | | [Arabidopsis thaliana] Length = 372 |
| 133 | 2024133 | 1E-139 >sp\|P32962\|NRL2_ARATH NITRILASE |
| | | 2 >gi\|322548\|pir\|\|S31969 nitnilase (EC 3.5.5.1) - |
| | | Arabidopsis thaliana >gi\|22656\|emb\|CAA48377\| |
| | | (X68305) nitrilase II [Arabidopsis |
| | | thaliana] >gi\|508733 (U09958) nitrilase |
| | | [Arabidopsis thaliana] Length = 339 |
| 134 | 2024134 | Tyr_Phospho_Site(555-561) |
| 135 | 2024135 | 2E-55 >gb\|AAD21451.1\| (AC007017) |
| | | DNA-binding protein [Arabidopsis |
| | | thaliana] Length = 145 |
| 136 | 2024136 | 7E-26 >gi\|2191150 (AF007269) |
| | | similar to mitochondrial carrier family |
| | | [Arabidopsis thaliana] Length = 352 |
| 137 | 2024137 | Rgd(662-664) |
| 138 | 2024138 | 7E-73 >gi\|1755182 (U75202) |
| | | germin-like protein |
| | | [Arabidopsis thaliana] Length = 147 |
| 139 | 2024139 | 3E-14 >gi\|1707012 (U78721) |
| | | tyrosyl-tRNA synthetase isolog |
| | | [Arabidopsis thaliana] Length 460 |
| 140 | 2024140 | Tyr_Phospho_Site(1124-1132) |
| 141 | 2024141 | 1E-70 >gi\|2924784 (AC002334) |
| | | similar to jasmonate inducible protein |
| | | [Arabidopsis thaliana] Length = 471 |
| 142 | 2024142 | 1E-112 >sp\|O04663\|IFE2_ARATH EUKARYOTIC |
| | | TRANSLATION INITIATION FACTOR |
| | | 4E (EIF-4E) (EIF4E) (MRNA CAP-BINDING |
| | | PROTEIN) (EIF-(ISO)4F 25 KD SUBUNIT) |
| | | (EIF-(ISO)4F P28 SUBUNIT) >gi\|2209274 |
| | | (U62044) eukaryotic initiation factor (iso)- |
| 143 | 2024143 | 2E-82 >gi\|2801536 (AF039531) |
| | | lysophospholipase homolog [Oryza |
| | | sativa] Length = 304 |
| 144 | 2024144 | 6E-77 >emb\|CAB38210\| (AL035601) |
| | | cytochrome P450 monooxygenase (CYP91A2) |
| | | [Arabidopsis thaliana] Length = 500 |
| 145 | 2024145 | 7E-50 >emb\|CAA19765\| (AL031004) |
| | | RSZp22 splicing factor [Arabidopsis |
| | | thaliana] >gi\|3435094\|gb\|AAD12769.1\| |
| | | (AF033586) 9G8-like SR protein |
| | | [Arabidopsis thaliana] Length = 200 |
| 146 | 2024146 | 0 >gi\|4098647 (U80668) homogentisate |
| | | 1,2-dioxygenase [Arabidopsis thaliana] Length 461 |
| 147 | 2024147 | Tyr_Phospho_Site(967-974) |
| 148 | 2024148 | Tyr_Phospho_Site(950-956) |
| 149 | 2024149 | 9E-13 >emb\|CAB10420.1\| (Z97341) LET1 |
| | | like protein [Arabidopsis thaliana] |
| | | Length = 578 |
| 150 | 2024150 | 6E-96 >gi\|4220454 (AC006216) |
| | | Similar to gi\|341 3714 T19L18.21 |
| | | myrosinase-binding protein from Arabidopsis thaliana |
| | | BAC gb\|AC004747. ESTs gb\|65870 and gb\|T20812 |
| | | come from this gene. [Arabidopsis thaliana] |
| | | Length = 303 |
| 151 | 2024151 | 1E-100 >emb\|CAA74028.1\| (Y13694) |
| | | multicatalytic endopeptidase complex, |
| | | proteasome precursor, beta subunit [Arabidopsis |
| | | thaliana] >gi\|2827525\|emb\|CAAl 6533.1\| |
| | | (AL021633) multicatalytic endopeptidase complex, |
| | | proteasome precursor, beta subunit [Arabidopsis |
| | | thaliana] >gi\|3421099 (AF043529) 205 |
| | | proteasome subunit PBA1 [Arabidopsis |
| | | thaliana] Length = 233 |
| 152 | 2024152 | 3E-61 >emb\|CAB45873.1\| (Y19104) |
| | | beta-alanine synthase [Lycopersicon |
| | | esculentum] Length = 300 |
| 153 | 2024153 | 2E-11 >gi\|3482913 (AC003970) |
| | | Similar to MtN21, gi\|2598575, Megicago |
| | | truncatula nodulation induced gene [Arabidopsis |
| | | thaliana] Length = 385 |
| 154 | 2024154 | 9E-28 >sp\|Q46948\|THIJ_ECOLI 4-METHYL- |
| | | 5(B-HYDROXYETHYL)-THIAZOLE MONO- |
| | | PHOSPHATE BIOSYNTHESIS |
| | | ENZYME >gi\|1100872 (U34923) ThiJ [Escherichia |
| | | coli] >gi\|1773108 (U82664) 4-methyl-5(b- |
| | | hydroxyethyl)-thiazole monophosphate biosynthesis |
| | | protein [Escherichia coli] >gi\|1786626 |
| | | (AE000148) 4-methyl-5(beta-hydroxyethyl)-thiazole |
| | | monophosphate synthesis [Escherichia coli] |
| | | Length = 198 |
| 155 | 2024155 | Tyr_Phospho_Site(758-765) |
| 156 | 2024156 | Tyr_Phospho_Site(577-585) |
| 157 | 2024157 | 2E-84 >sp\|P2I218\|PCR_ARATH PROTO- |
| | | CHLOROPHYLLIDE REDUCTASE PRECURSOR |
| | | (PCR) (NADPH-PROTOCHLOROPHYLLIDE |
| | | OXIDOREDUCTASE) >gi\|968977 (U29785) |
| | | NADPH:protochlorophyllide |
| | | oxidoreductase B [Arabidopsis |
| | | thaliana] >gi\|4972069\|emb\|CAB43876.1\| |
| | | (AL078467) protochlorophyllide reductase |
| | | precursor [Arabidopsis |
| | | thaliana] >gi\|1583456\|prf\|\|2120441B |
| | | protochlorophyllide oxidoreductase [Arabidopsis |
| | | thaliana] Length = 401 |
| 158 | 2024158 | Rgd(1197-1199) |
| 159 | 2024159 | Tyr_Phospho_Site(24-32) |
| 160 | 2024160 | Tyr_Phospho_Site(642-649) |
| 161 | 2024161 | 1E-15 >gi\|2352492 (AF005047) |
| | | transport inhibitor response 1 [Arabidopsis |
| | | thaliana] >gi\|2352494 (AF005048) transport |
| | | inhibitor response 1 |
| | | [Arabidopsis thaliana] Length = 594 |
| 162 | 2024162 | Tyr_Phospho_Site(1187-1194) |
| 163 | 2024163 | Tyr_Phospho_Site(927-935) |
| 164 | 2024164 | 1E-115 >gb\|AAD15571\| (AC006340) |
| | | MADS-box protein AGLI7 |
| | | [Arabidopsis thaliana] Length = 227 |
| 165 | 2024165 | Tyr_Phospho_Site(723-729) |
| 166 | 2024166 | Tyr_Phospho_Site(841-848) |
| 167 | 2024167 | 3E-46 >sp\|P87068\|SYRP_LACBI SYMBIOSIS- |
| | | RELATED PROTEIN Length = 184 |
| 168 | 2024168 | 1E-103 >pir\|\|S66345 senescence-associated |
| | | protein sen1 - Arabidopsis thaliana >gi\|1046270 |
| | | (U26945) senescence-associated protein [Arabidopsis |
| | | thaliana] >gi\|3367595\|emb\|CAA20047\| (AL031135) |
| | | senescence-associated protein sen1 [Arabidopsis |
| | | thaliana] >gi\|3805843\|emb\|CAA21463.1\| (AL031986) |
| | | senescence-associated protein sen1 [Arabidopsis |
| | | thaliana] Length = 182 |
| 169 | 2024169 | 5E-36 >emb\|CAA09367\| (AJ010811) HB2 |
| | | homeodomain protein [Populus tremula x Populus |
| | | tremuloides] Length = 261 |
| 170 | 2024170 | Pkc_Phospho_Site(44-46) |
| 171 | 2024171 | 4E-33 >sp\|P17009\|RR10_CYAPA CYANELLE |
| | | 30S RIBOSOMAL PROTEIN |
| | | S10 >gi\|70927\|pir\|\|R3KT10 ribosomal protein |
| | | S10 - Cyanophora paradoxa |
| | | cyanelle >gi\|11391\|emb\|CAA36388\| (X52143) |
| | | ribosomal protein S10 (AA 1-105) |
| | | [Cyanophora paradoxa] |
| 172 | 2024172 | 8E-97 >sp\|P92959\|RK24_ARATH 50S |
| | | RIBOSOMAL PROTEIN L24, CHLOROPLAST |
| | | PRECURSOR >gi\|1694974\|emb\|CAA70851\| (Y09635) |
| | | plastid ribosomal protein [Arabidopsis thaliana] |
| | | Length = 198 |
| 173 | 2024173 | 1E-18 >pir\|S51352 probable membrane |
| | | protein YLR350w-yeast (Saccharomyces |
| | | cerevisiae) >gi\|609381 (U19028) Ylr350wp |
| | | [Saccharomyces cerevisiae] Length = 216 |
| 174 | 2024174 | 1E-125 >sp\|O04928\|CDS1_ARATH PHOS- |
| | | PHATIDATE CYTIDYLYLTRANSFERASE |
| | | (CDP-DIGLYCERIDE SYNTHETASE) (CDP- |
| | | DIGLYCERIDE PYROPHOSPHORYLASE) |
| | | (CDP-DIACYLGLYCEROL SYNTHASE) (CDS) |
| | | (CTP:PHOSPHATIDATE CYTIDYLYLTRANS- |
| | | FERASE) (CDP-DAG |
| | | SYNTHASE) >gi\|2181182\|emb\|CAA63969\| |
| | | (X94306) CDP-diacylglycerol synthetase |
| | | [Arabidopsis thaliana] Length = 421 |
| 175 | 2024175 | Tyr_Phospho_Site(527-533) |
| 176 | 2024176 | 8E-40 >gb\|AAD31347.1\|AC007212_3 (AC007212) |
| | | mitochondrial protein [Arabidopsis |
| | | thaliana] Length = 996 |
| 177 | 2024177 | Tyr_Phospho_Site(921-928) |
| 178 | 2024178 | 2E-20 >pir\|\|S67312 probable membrane |
| | | protein YDR255c - yeast (Saccharomyces |
| | | cerevisiae) >gi\|1136210\|emb\|CAA92712\| |
| | | (Z68329) unknown [Saccharomyces |
| | | cerevisiae] >gi\|1226031\|emb\|CAA94094\| |
| | | (Z70202) unknown [Saccharomyces |
| | | cerevisiae] Length = 421 |
| 179 | 2024179 | 2E-59 ) >gb\|AAD25609.1\|AC005287_11 |
| | | (AC005287) translation initiation factor |
| | | [Arabidopsis thaliana] Length = 113 |
| 180 | 2024180 | 2E-43 >emb\|CAB56692.1\| (AJ249794) |
| | | lipoxygenase [Arabidopsis thaliana] |
| | | Length = 919 |
| 181 | 2024181 | 1E-113 >emb\|CAB39679.1\| (AL049483) |
| | | beta-galactosidase [Arabidopsis |
| | | thaliana] Length = 729 |
| 182 | 2024182 | 3E-74 >emb\|CAA18498\| (AL022373) |
| | | DnaJ-Iike protein [Arabidopsis |
| | | thaliana] Length = 161 |
| 183 | 2024183 | Tyr_Phospho_Site(149-156) |
| 184 | 2024184 | Tyr_Phospho_Site(890-897) |
| 185 | 2024185 | Tyr_Phospho_Site(915-921) |
| 186 | 2024186 | 3E-12 >sp\|P72777\|Y54L_SYNY3 YCF54- |
| | | LIKE PROTEIN >gi\|1651865\|dbj\|BAA16792\| |
| | | (D90900) hypothetical protein [Synechocystis sp.] |
| | | Length = 133 |
| 187 | 2024187 | Tyr_Phospho_Site(1377-1384) |
| 188 | 2024188 | Tyr_Phospho_Site(163-171) |
| 189 | 2024189 | 1E-140 >gi\|2150027 (AF001269) |
| | | NADP-malic enzyme [Lycopersicon |
| | | esculentum] Length = 640 |
| 190 | 2024190 | Tyr_Phospho_Site(834-841) |
| 191 | 2024191 | IE-90 >sp\|P34790\|CYP1_ARATH PEPTIDYL- |
| | | PROLYL CIS-TRANS ISOMERASE (PPIASE) |
| | | (ROTAMASE) (CYCLOPHILIN) (CYCLOSPORIN |
| | | A-BINDING PROTEIN) >gi\|405129 |
| | | (L14844) cyclophilin [Arabidopsis |
| | | thaliana] >gi\|4490326\|emb\|CAB38608.1\| |
| | | (AL035656) peptidylprolyl isomerase ROC1 |
| | | [Arabidopsis thaliana] Length = 172 |
| 192 | 2024192 | 1E-31 >gi\|4115383 (AC005967) |
| | | receptor-like protein kinase [Arabidopsis |
| | | thaliana] Length = 809 |
| 193 | 2024193 | 3E-97 >pir\|\|S50141 peptidylprolyl |
| | | isomerase (EC 5.2.1.8) - Arabidopsis |
| | | thaliana >gi\|460968 (U07276) peptidyl-prolyl |
| | | cis-trans isomerase [Arabidopsis |
| | | thaliana] >gi\|992643 (U32186) cyclophilin |
| | | [Arabidopsis thaliana] >gi |
| 194 | 2024194 | Tyr_Phospho_Site(408-415) |
| 195 | 2024195 | Tyr_Phospho_Site(777-784) |
| 196 | 2024196 | Pkc_Phospho_Site(20-22) |
| 197 | 2024197 | Tyr_Phospho_Site(402-409) |
| 198 | 2024198 | 3E-25 >gi\|2688824 (U93273) |
| | | auxin-repressed protein [Prunus |
| | | armeniaca] Length = 133 |
| 199 | 2024199 | Tyr_Phospho_Site(31-38) |
| 200 | 2024200 | Pkc_Phospho_Site(28-30) |
| 201 | 2024201 | Pkc_Phospho_Site(25-27) |
| 202 | 2024202 | Pkc_Phospho_Site(43-45) |
| 203 | 2024203 | 1E-42 >gb\|AAD26876.1\|AC007230_10 |
| | | (AC007230) Belongs to PF100026 |
| | | Eukaryotic aspartyl protease family. |
| | | [Arabidopsis thaliana] Length = 449 |
| 204 | 2024204 | 1E-112 >gi\|1669387 (U41998) |
| | | actin 2 [Arabidopsis thaliana] Length = 377 |
| 205 | 2024205 | 1E-69 >sp\|P52410\|FABB_ARATH 3- |
| | | OXOACYL-[ACYL-CARRIER-PROTEIN] |
| | | SYNTHASE I PRECURSOR (BETA- |
| | | KETOACYL-ACP SYNTHASE I) |
| | | (KAS I) >gi\|780814 (U24177) 3-ketoacyl-acyl |
| | | carrier protein synthase I [Arabidopsis |
| | | thaliana] Length = 473 |
| 206 | 2024206 | 1E-111) >gi\|2281094 (AC002333) |
| | | molybdenum cofactor biosynthesis protein E isolog |
| | | [Arabidopsis thaliana] >gi\|4469121\|emb\|CAB38428\| |
| | | (AJ133519) molybdopterin synthase large subunit |
| | | [Arabidopsis thaliana] Length = 198 |
| 207 | 2024207 | 1E-45 >emb\|CAB41717.1\| (AL049730) |
| | | pEARLI 1-like protein [Arabidopsis |
| | | thaliana] Length = 161 |
| 208 | 2024208 | 2E-49 >gb\|AAD20164\| (AC006418) auxin |
| | | response factor 1 [Arabidopsis |
| | | thaliana] Length = 622 |
| 209 | 2024209 | Tyr_Phospho_Site(292-299) |
| 210 | 2024210 | 3E-97 >pir\|\|S52771 beta-glucosidase |
| | | (EC 3.2.1.21) - rape >gi\|757740\|emb\|CAA57913\| |
| | | (X82577) beta-glucosidase [Brassica napus] |
| | | Length = 514 |
| 211 | 2024211 | 5E-85 >gb\|AAD24852.1\|AC007071_24 |
| | | (AC007071) 40S ribosomal protein; |
| | | contains C-terminal domain [Arabidopsis thaliana] |
| | | Length = 250 |
| 212 | 2024212 | 7E-95 >dbj\|BAA3l585.1\| (AB016066) |
| | | mitochondrial phosphate transporter |
| | | [Arabidopsis thaliana] Length = 288 |
| 213 | 2024213 | 4E-17 >gi\|4102690 (AF004806) 24 |
| | | kDa seed maturation protein [Glycine |
| | | maxi Length = 212 |
| 214 | 2024214 | Tyr_Phospho_Site(40-47) |
| 215 | 2024215 | 3E-85 >gb\|AAD20423\| (AC007019) |
| | | RAS-related protein RAB7 |
| | | [Arabidopsis thaliana] Length = 230 |
| 216 | 2024216 | Tyr_Phospho_Site(1316-1323) |
| 217 | 2024217 | 1E-151 >gi\|2281088 (AC002333) |
| | | indole-3-acetate beta-glucosyltransferase |
| | | isolog [Arabidopsis thaliana] Length = 449 |
| 218 | 2024218 | 1E-160 >sp\|P37702\|MYRO_ARATH MYRO- |
| | | SINASE PRECURSOR (SINIGRINASE) |
| | | (THIOGLUCOSIDASE) >gi\|1362006\|pir\|\|S56653 |
| | | thioglucosidase (EC 3.2.3.1) - Arabidopsis |
| | | thaliana >gi\|304115 (L11454) thioglucosidase |
| | | [Arabidopsis thaliana] >gi\|871990 |
| 219 | 2024219 | Zinc_Finger_C2h2(1007-1028) |
| 220 | 2024220 | 2E-39 >sp\|Q03251\|GRP8_ARATH GLYCINE- |
| | | RICH RNA-BINDING PROTEIN 8 (CCRI |
| | | PROTEIN) >gi\|419756\|pir\|\|S30148 |
| | | glycine-rich protein (clone AtGRP8) - Arabidopsis |
| | | thaliana >gi\|16305\|emb\|CAA78712\|(Z14988) |
| | | glycine rich protein [Arabidopsis |
| | | thaliana] >gi\|166658 (L04171) ORE |
| | | [Arabidopsis thaliana] >gi\|166839 |
| | | (L00649) RNA-binding protein [Arabidopsis |
| | | thaliana] >gi\|4914438\|emb\|CAB43641.1\| |
| | | (AL050351) glycine-rich protein (clone AtGRP8) |
| | | [Arabidopsis thaliana] Length 169 |
| 221 | 2024221 | 2E-52 >sp\|O22060\|SPS1_CITUN SUCROSE- |
| | | PHOSPHATE SYNTHASE 1 (UDP-GLUCOSE- |
| | | FRUCTOSE-PHOSPHATE GLUCOSYLTRANS- |
| | | FERASE 1) >gi\|2588888\|dbj\|BAA23213\| |
| | | (AB005023) sucrose-phosphate synthase [Citrus |
| | | unshiu] Length = 1057 |
| 222 | 2024222 | 2E-84 >emb\|CAA17163\| (AL021890) |
| | | peroxidase prxrl [Arabidopsis |
| | | thaliana] >gi\|2961341\|emb\|CAA18099.1\| |
| | | (AL022140) peroxidase prxr1 |
| | | [Arabidopsis thaliana] Length = 323 |
| 223 | 2024223 | Pkc_Phospho_Site(28-30) |
| 224 | 2024224 | Tyr_Phospho_Site(100-107) |
| 225 | 2024225 | 8E-42 >gi\|3600033 (AF080119) contains |
| | | similarity to the N terminal domain of the E1 protein |
| | | (Pfam: E1_N.hmm, score: 12.36) [Arabidopsis |
| | | thaliana] Length = 1074 |
| 226 | 2024226 | 2E-85 >sp\|P46645\|AAT2_ARATH ASPARTATE |
| | | AMINOTRANSFERASE, CYTOPLASMIC |
| | | ISOZYME 1 (TRANSAMINASE |
| | | A) >gi\|693690 (U15033) aspartate aminotransferase |
| | | [Arabidopsis thaliana] Length = 405 |
| 227 | 2024227 | Tyr_Phospho_Site(737-744) |
| 228 | 2024228 | Tyr_Phospho_Site(819-827) |
| 229 | 2024229 | Tyr_Phospho_Site(707-714) |
| 230 | 2024230 | 7E-37 >sp\|P02308\|H4_WHEAT HISTONE |
| | | H4 >gi\|70771\|pir\|\|HSZM4 histone H4 - |
| | | maize >gi\|81642\|pir\|\|S06904 histone |
| | | H4 -Arabidopsis thaliana >gi\|2119028\|pir\|\|S60475 |
| | | histone H4 - garden pea >gi\|21795\|emb\|CAA24924\| |
| | | (X00043) histone H4 [Triticum aestivum] >gi\|166740 |
| | | (M17132) histone H4 [Arabidopsis |
| | | thaliana] >gi\|166742 (M17133) histone H4 |
| | | [Arabidopsis thaliana] >gi\|168499 (M36659) |
| | | histone H4 (H4C13) [Zea mays] >gi\|168501 |
| | | (M13370) histone H4 [Zea mays] >gi\|168503 |
| | | (M13377) histone H4 [Zea mays] >gi\|498898 |
| | | (U10042) histone H4 homolog [Pisum |
| | | sativum] >gi\|1806285\|emb\|CAB01914\| |
| | | (Z79638) histone H4 homologue [Sesbania |
| | | rostrata] >gi\|3927823 (AC005727) |
| | | histone H4 [Arabidopsis |
| | | thaliana] >gi\|4580385\|gb\|AAD24364.1\|AC007184_4 |
| | | (AC007184) histone H4 [Arabidopsis |
| | | thaliana] >gi\|6009915\|dbj\|BAA85120.1\| |
| | | (AB018245) histone H4-like protein [Solanum |
| | | melongena] >gi\|225838\|prf\|\|1314298A histone |
| | | H4 [Arabidopsis thaliana] Length = 103 |
| 231 | 2024231 | 2E-60 >sp\|P39925\|AFG3_YEAST MITO- |
| | | CHONDRIAL RESPIRATORY CHAIN |
| | | COMPLEXES ASSEMBLY PROTEIN AFG3 |
| | | (TAT-BINDING HOMOLOG |
| | | 10) >gi\|626985\|pir\|\|S46611 YTA10 protein - yeast |
| | | (Sacoharomyces cerevisiae) >gi\|531750\|emb\|CAA56953\| |
| | | (X81066) probable mitochondrial protein |
| | | [Saccharomyces cerevisiae] >gi\|603609 (U18778) |
| | | Afg3p [Saccharomyces cerevisiae] Length = 761 |
| 232 | 2024232 | 8E-60 >gi\|3850579 (AC005278) Strong |
| | | similarity to gb\|D14550 extracellular dermal |
| | | glycoprotein (EDGP) precursor from Daucus carota. |
| | | ESTs gb\|H37281, gb\|T44167, gb\|T21813, gb\|N38437, |
| | | gb\|Z26470, gb\|R65072, gb\|N76373, gb\|F15470, |
| | | gb\|Z35182, gb\|H76373, gb\|Z34678 an... |
| | | Length = 433 |
| 233 | 2024233 | Tyr_Phospho_Site(1019-1026) |
| 234 | 2024234 | 3E-13 >gb\|AAD28548.1\|AF111941_1 (AF111941) |
| | | development protein DG1148 [Dictyostelium |
| | | discoideum] Length = 306 |
| 235 | 2024235 | 1E-62 >gi\|1256595 (U38915) LAB |
| | | [Synechocystis PCC6803] Length = 379 |
| 236 | 2024236 | Pkc_Phospho_Site(4-6) |
| 237 | 2024237 | Tyr_Phospho_Site(742-749) |
| 238 | 2024238 | Pkc_Phospho_Site(7-9) |
| 239 | 2024239 | 1E-100 >gb\|AAD14483\| (AC005966) |
| | | Strong similarity to gb\|AF061286 gamma-adaptin 1 |
| | | from Arabidopsis thaliana. EST gb\|H37393 comes |
| | | from this gene. [Arabidopsis thaliana] |
| | | Length = 867 |
| 240 | 2024240 | 3E-84 >sp\|P41127\|RL13_ARATH 60S |
| | | RIBOSOMAL PROTEIN L13 (BBC1 |
| | | PROTEIN HOMOLOG) >gi\|480787\|pir\|\|S37271 |
| | | ribosomal protein L13 - Arabidopsis |
| | | thaliana >gi\|404166\|emb\|CAA53005\| (X75162) |
| | | BBC1 protein [Arabidopsis thaliana] Length = 20 |
| 241 | 2024241 | 1E-105 >emb\|CAA06834.1\| (AJ006053) |
| | | peroxisomal membrane protein [Arabidopsis |
| | | thaliana] >gi\|4773886\|gb\|AAD29759.1\|AF076243_6 |
| | | (AF076243) pmp22 peroxisomal membrane protein |
| | | [Arabidopsis thaliana] Length = 190 |
| 242 | 2024242 | Rgd(1013-1015) |
| 243 | 2024243 | 3E-37 >gb\|AAD29842.1\|AF064694_1 (AF064694) |
| | | catechol O-methyltransferase; Omt II;THATU;2 |
| | | [Thalictrum tuberosum] Length = 362 |
| 244 | 2024244 | Rgd(653-655) |
| 245 | 2024245 | Tyr_Phospho_Site(632-638) |
| 246 | 2024246 | 1E-38 >gi\|1388088 (U35831) thioredoxin m |
| | | [Pisum sativum] Length = 172 |
| 247 | 2024247 | Tyr_Phospho_Site(1204-1211) |
| 248 | 2024248 | Tyr_Phospho_Site(314-320) |
| 249 | 2024249 | Pkc_Phospho_Site(71-73) |
| 250 | 2024250 | Tyr_Phospho_Site(963-970) |
| 251 | 2024251 | 4E-67 >gi\|1408471 (U48938) actin |
| | | depolymerizing factor 1 [Arabidopsis |
| | | thaliana] >gi\|3851707 (AF102173) actin |
| | | depolymerizing factor 1 [Arabidopsis |
| | | thaliana] Length = 139 |
| 252 | 2024252 | 9E-18 >gi\|2062157 (AC001645) jasmonate |
| | | inducible protein isolog [Arabidopsis thaliana] |
| | | Length = 705 |
| 253 | 2024253 | 2E-84 >gi\|3478700 (AF034387) AFT protein |
| | | [Arabidopsis thaliana] Length = 368 |
| 254 | 2024254 | 1E-128 ) >gi\|3169569 (AF062589) 3-keto- |
| | | acyl-CoA thiolase 2 [Arabidopsis |
| | | thaliana] >gi\|3220237 (AF062591) peroxisomal |
| | | 3-keto-acyl-CoA thiolase 2 precursor [Arabidopsis |
| | | thaliana] Length = 457 |
| 255 | 2024255 | 1E-83 >sp\|P35132\|UBC9_ARATH UBIQUITIN- |
| | | CONJUGATING ENZYME E2-17 KD 9 |
| | | (UBIQUITIN-PROTEIN LIGASE 9) |
| | | (UBIQUITIN CARRIER PROTEIN 9) |
| | | (UBCAT4B) >gi\|421 857\|pir\|\|S32674 ubiquitin-protein |
| | | ligase (EC 6.3.2.19) UBC9 - Arabidopsis |
| | | thaliana >gi\|297884\|emb\|CAA78714\| (Z14990) |
| | | ubiquitin conjugating enzyme homolog [Arabidopsis |
| | | thaliana] >gi\|349211 (L00639) ubiguitin |
| | | conjugating enzyme [Arabidopsis |
| | | thaliana] >gi1600391\|emb\|CAA51201\| |
| | | (X72626) ubiquitin conjugating enzyme E2 [Arabi- |
| | | dopsis thaliana] >gi\|4455355\|emb\|CAB36765.1\| |
| | | (AL035524) ubiguitin-protein ligase UBC9 [Arabidopsis |
| | | thaliana] Length = 148 |
| 256 | 2024256 | 3E-95 >gi\|3044218 (AF057144) signal |
| | | peptidase [Arabidopsis thaliana] |
| | | Length = 167 |
| 257 | 2024257 | 8E-75 >sp\|P34788\|RS18_ARATH 40S |
| | | RIBOSOMAL PROTEIN S18 >gi\|480908\|pir\|\|S37496 |
| | | ribosomal protein S18.A - Arabidopsis |
| | | thaliana >gi\|405613\|emb\|CAA80684\| (Z23165) |
| | | ribosomal protein S18A [Arabidopsis |
| | | thaliana] >gi\|434343\|emb\|CAA82273\| (Z28701) |
| | | S18 ribosomal protein [Arabidopsis |
| | | thaliana] >gi\|434345\|emb\|CAA82274\| (Z28702) |
| | | S18 ribosomal protein [Arabidopsis |
| | | thaliana] >gi\|434906\|emb\|CAA82275\| (Z28962) |
| | | S18 ribosomal protein [Arabidopsis |
| | | thaliana] >gi\|2505871\|emb\|CAA72909\| (Y12227) |
| | | ribosomal protein Si 8A [Arabidopsis |
| | | thaliana] >gi\|3287678 (AC003979) Match to |
| | | ribosomal S18 gene mRNA gb\|Z28701, DNA |
| | | gb\|Z23165 from A. thaliana. ESTs gb\|T21121, |
| | | gb\|Z17755, gb\|R64776 and gb\|R30430 come from |
| | | this gene. [Arabidopsis |
| | | thaliana] >gi\|4538910\|emb\|CAB39647.1\| |
| | | (AL049482) S18.A ribosomal protein [Arabidopsis |
| | | thaliana] Length = 152 |
| 258 | 2024258 | 2E-64 >gi\|3402679 (AC004697) unknown |
| | | protein [Arabidopsis thaliana] Length = 1029 |
| 259 | 2024259 | 2E-15 >emb\|CAA03859\| (AJ000016) Cks1 |
| | | protein [Arabidopsis |
| | | thaliana] >gi\|4510420\|gb\|AAD21506.1\| |
| | | (AC006929) cyclin-dependent kinase regulatory |
| | | subunit [Arabidopsis thaliana] Length = 87 |
| 260 | 2024260 | 1E-93 ) >dbj\|BAA82069.1\| (AB022330) |
| | | nClpP5 [Arabidopsis thaliana] Length = 387 |
| 261 | 2024261 | Pkc_Phospho_Site(22-24) |
| 262 | 2024262 | 1E-108 >sp\|O23515\|RL15_ARATH 60S RIBOSO- |
| | | MAL PROTEIN L15 >gi\|2245027\|emb\|CAB10447.1\| |
| | | (Z97341) ribosomal protein [Arabidopsis thaliana] |
| | | Length = 204 |
| 263 | 2024263 | 3E-86 >gi\|3953473 (AC002328) F2202.18 |
| | | [Arabidopsis thaliana] >gi\|5734520\|emb\|CAB52748.1\| |
| | | (AJ245630) photosystem I subunit V precursor |
| | | [Arabidopsis thaliana] Length = 160 |
| 264 | 2024264 | Pkc_Phospho_Site(66-68) |
| 265 | 2024265 | 1E-110 >gi\|3834324 (AC005679) Similar to |
| | | gb\|X92762 tafazzins protein from Homo sapiens. |
| | | [Arabidopsis thaliana] Length = 284 |
| 266 | 2024266 | 2E-90 >gi\|2511715 (AF019380) |
| | | phosphatidylinositol-4-phosphate 5-kinase |
| | | [Arabidopsis thaliana] Length = 752 |
| 267 | 2024267 | 5E-98 >sp\|O50061\|RK4_ARATH 50S RIBOSO- |
| | | MAL PROTEIN L4, CHLOROPLAST |
| | | PRECURSOR >gi\|2791998\|emb\|CAA74895\| |
| | | (Y14566) ribosomal protein L4 [Arabidopsis |
| | | thaliana] >gi\|2792000\|emb\|CAA74894\| |
| | | (Y14565) ribosomal protein L4 [Arabidopsis th |
| 268 | 2024268 | 1E-112 >gi\|2281631 (AF003096) AP2 |
| | | domain containing protein RAP2.3 |
| | | [Arabidopsis thaliana] Length = 248 |
| 269 | 2024269 | 2E-74 >emb\|CAA74175\| (Y13860) enoyl-ACP |
| | | reductase [Arabidopsis thaliana] Length 390 |
| 270 | 2024270 | 4E-82 >gi\|2352828 (AF009228) NaCl- |
| | | inducible Ca2+-binding protein |
| | | [Arabidopsis thaliana] Length = 155 |
| 271 | 2024271 | Tyr_Phospho_Site(115-122) |
| 272 | 2024272 | Pkc_Phospho_Site(35-37) |
| 273 | 2024273 | Tyr_Phospho_Site(1400-1407) |
| 274 | 2024274 | 1E-62 >gi\|3834310 (AC005679) Similar |
| | | to Ubiquitin-conjugating enzyme E2-17 KD gb\|D83004 |
| | | from Homo sapiens. ESTs gb\|T88233, gb\|Z24464, |
| | | gb\|N37265, gb\|H36151, gb\|Z34711, |
| | | gb\|AA040983, and gb\|T22122 come from this |
| | | gene. [Arabidopsis thaliana] Length 163 |
| 275 | 202427S | Pkc_Phospho_Site(35-37) |
| 276 | 2024276 | Pkc_Phospho_Site(41-43) |
| 277 | 2024277 | 1E-72 ) >g\|2316016 (U92650) MRP-like |
| | | ABC transporter [Arabidopsis |
| | | thaliana] Length = 1515 |
| 278 | 2024278 | Tyr_Phospho_Site(1356-1364) |
| 279 | 2024279 | Tyr_Phospho_Site(823-830) |
| 280 | 2024280 | Tyr_Phospho_Site(280-288) |
| 281 | 2024281 | Tyr_Phospho_Site(564-571) |
| 282 | 2024282 | Rgd(1265-1267) |
| 283 | 2024283 | Pkc_Phospho_Site(27-29) |
| 284 | 2024284 | 4E-62 >sp\|P37225\|MAON_SOLTU MALATE |
| | | OXIDOREDUCTASE [NAD] 59 KD ISOFORM, |
| | | MITOCHONDRIAL PRECURSOR (MALIC |
| | | ENZYME) (ME) (NAD-DEPENDENT MALIC |
| | | ENZYME) (NAD-ME) >gi\|1076666\|pir\|\|A53318 |
| | | malate dehydrogenase (decarboxylating) (EC 1.1.1.39) |
| | | 59K chain precursor, mitochondrial - |
| | | potato >gi\|438131\|emb\|CAA80547\| (Z23002) |
| | | precursor of the 59kDa subunit of the mitochondrial |
| | | NAD+-dependent malic enzyme [Solanum |
| | | tuberosum] Length = 601 |
| 285 | 2024285 | 5E-81 >sp\|P25069\|CAL2_ARATH CALMODULIN- |
| | | 2/3/5 >gi\|99671\|pir\|\|522503 calmodulin - |
| | | Arabidopsis thaliana >gi\|1076437\|pir\|\|S53006 |
| | | calmodulin - leaf mustard >gi\|2146726\|pir\|\|S71513 |
| | | calmodulin - Arabidopsis thaliana >gi\|166651 |
| | | (M38380) calmodulin-2 [Arabidopsis |
| | | thaliana] >gi\|166653 (M73711) calmodulin-3 |
| | | [Arabidopsis thaliana] >gi\|474183\|emb\|CAA47690\| |
| | | (X67273) calmodulin [Arabidopsis |
| | | thaliana] >gi\|497992 (U10150) calmodulin |
| | | [Brassica napus] >gi\|899058 (M88307) calmodulin |
| | | [Brassica juncea] >gi\|1183005\|dbj\|BAA08283\| |
| | | (D45848) calmodulin [Arabidopsis |
| | | thaliana] >gi\|3402706 (AC004261) unknown protein |
| | | [Arabidopsis thaliana] >gi\|3885333 (AC005623) |
| | | calmodulin [Arabidopsis |
| | | thaliana] >gi\|228407\|prf\|\|1803520A calmodulin 2 |
| | | [Arabidopsis thaliana] Length = 149 |
| 286 | 2024286 | 1E-100 >sp\|O23264\|SBP_ARATH SELENIUM- |
| | | BINDING PROTEIN >gi\|2244759\|emb\|CAB10182.1\| |
| | | (Z97335) selenium-binding protein like |
| | | [Arabidopsis thaliana] Length = 490 |
| 287 | 2024287 | 3E-58 >gi\|3831443 (AC005819) auxin- |
| | | regulated protein [Arabidopsis |
| | | thaliana] Length = 121 |
| 288 | 2024288 | Tyr_Phospho_Site(1271-1278) |
| 289 | 2024289 | 5E-43 >gi\|4235430 (AF098458) latex- |
| | | abundant protein [Hevea brasiliensis] Length = 417 |
| 290 | 2024290 | 3E-12 >dbj\|BAA77516.1\| (AB026987) a |
| | | dynamin-like protein ADL3 |
| | | [Arabidopsis thaliana] Length = 836 |
| 291 | 2024291 | 3E-86 >gi\|3386614 (AC004665) transcription |
| | | factor SF3 [Arabidopsis thaliana] Length = 226 |
| 292 | 2024292 | 2E-94 >gi\|1644427 (U74610) glyoxalase II |
| | | [Arabidopsis thaliana] Length = 256 |
| 293 | 2024293 | Pkc_Phospho_Site(76-78) |
| 294 | 2024294 | 4E-72 >sp\|O50003\|RL12_PRUAR 60S |
| | | RIBOSOMAL PROTEIN L12 >gi\|2677830 (U93168) |
| | | ribosomal protein L12 [Prunus armeniaca] |
| | | Length = 166 |
| 295 | 2024295 | 2E-85 ) >sp\|P35131\|UBC8_ARATH UBIQUITIN- |
| | | CONJUGATING ENZYME E2-17 KD 8 |
| | | (UBIQUITIN-PROTEIN LIGASE 8) |
| | | (UBIQUITIN CARRIER PROTEIN 8) |
| | | (UBCAT4A) >gi\|398699\|emb\|CAA78713\| (Z14989) |
| | | ubiquitin conjugating enzyme homolog [Arabidopsis thal |
| 296 | 2024296 | 5E-76 ) >emb\|CAA19826.1\| (AL031018) gamma- |
| | | glutamylcysteine synthetase [Arabidopsis |
| | | thaliana] >gi\|4262277\|gb\|AAD14544\| |
| | | (AF068299) gamma-glutamylcysteine synthetase |
| | | [Arabidopsis thaliana] Length = 522 |
| 297 | 2024297 | 4E-91 >emb\|CAB10561.1\| (Z97344) SUPERMAN |
| | | like protein [Arabidopsis thaliana] Length = 180 |
| 298 | 2024298 | 5E-97 >gi\|3582341 (AC005496) flavonol |
| | | 3-O-glucosyltransferase [Arabidopsis thaliana] |
| | | Length = 474 |
| 299 | 2024299 | Tyr_Phospho_Site(1285-1292) |
| 300 | 2024300 | 7E-12 >gi\|1208874 (U50071) C. elegans |
| | | ankyrin-refated unc-44 (GB:U21734) [Caenorhabditis |
| | | elegans] >gi\|1814197 (U39847) AO66 ankyrin |
| | | [Caenorhabditis elegans] Length = 1867 |
| 301 | 2024301 | 1E-119 >gi\|1235680 (U48698) receptor |
| | | serine/threonine kinase PR5K [Arabidopsis |
| | | thaliana] >gi\|1589714\|prf\|\|2211427A |
| | | receptor protein kinase [Arabidopsis |
| | | thaliana] Length = 665 |
| 302 | 2024302 | 1E-52 >gi\|2979554 (AC003680) CDC4 |
| | | like protein [Arabidopsis thaliana] |
| | | Length = 2946 |
| 303 | 2024303 | Tyr_Phospho_Site(203-211) |
| 304 | 2024304 | 1E-15 >gi\|1931652 (U95973) |
| | | phosphatidylinositol-4-phosphate 5-kinase |
| | | isolog [Arabidopsis thaliana] Length = 859 |
| 305 | 2024305 | 1E-118 >gi\|968975 (U29699) |
| | | NADPH:protochlorophyllide |
| | | oxidoreductase A [Arabidopsis |
| | | thaliana]>gi\|1583455\|prf\|\|2120441 A |
| | | protochiorophyllide oxidoreductase [Arabidopsis |
| | | thaliana] Length = 405 |
| 306 | 2024306 | Tyr_Phospho_Site(109-117) |
| 307 | 2024307 | 5E-77 >gi\|2576363 (U39783) amino |
| | | acid transport protein [Arabidopsis |
| | | thaliana] Length = 432 |
| 308 | 2024308 | 1E-48 >gi\|170131 (M55322) ribosomal |
| | | protein 30S subunit [Spinacia |
| | | oleracea] Length = 302 |
| 309 | 2024309 | Tyr_Phospho_Site(539-547) |
| 310 | 2024310 | Rgd(366-368) |
| 311 | 2024311 | 9E-99 >gi\|2565436 (AF028842) DegP |
| | | protease precursor [Arabidopsis |
| | | thaliana] Length = 437 |
| 312 | 2024312 | 4E-37 >gi\|2621768 (AE000848) ribonuclease |
| | | PH [Methanobacterium |
| | | thermoautotrophicum] Length = 240 |
| 313 | 2024313 | 3E-22 >emb\|CAB45787.1\| (AL080252) inositol |
| | | 1,3,4-trisphosphate 5/6-kinase-like protein |
| | | [Arabidopsis thaliana] Length = 338 |
| 314 | 2024314 | 2E-26 >gb\|AAD18154\| (AC006260) receptor |
| | | protein kinase [Arabidopsis thaliana] Length 961 |
| 315 | 2024315 | 4E-77 >sp\|P49730\|R1R2_TOBAC RIBO- |
| | | NUCLEOSIDE-DIPHOSPHATE REDUCTASE |
| | | SMALL CHAIN (RIBONUCLEOTIDE |
| | | REDUCTASE) (R2 |
| | | SUBUNIT) >gi\|1044912\|emb\|CAA63194\| |
| | | (X92443) ribonucleotide reductase R2 [Nicotiana |
| | | tabacum] Length = 329 |
| 316 | 2024316 | 4E-88 >gb\|AAD49760.1\|AC007932_8 (AC007932) |
| | | Similar to gi\|4982048 ribosomal protein L18 from |
| | | Thermotoga maritima genome gb\|AE001798. ESTs |
| | | gb\|Z3561 3, gb\|T75951, gb\|T22182, gb\|T45962, |
| | | gb\|H76281 and gb\|AI100025 come from this gene. |
| | | [Arabidopsis thaliana] Length = 170 |
| 317 | 2024317 | 1E-108 >emb\|CAB43186.1\| (AJ133753) peptide |
| | | methionine sulfoxide reductase [Arabidopsis |
| | | thaliana] >gi\|4884035\|emb\|CAB43187.1\| |
| | | (AJ133754) peptide methionine sulfoxide reductase |
| | | [Arabidopsis thaliana] Length = 204 |
| 318 | 2024318 | Pkc_Phospho_Site(222-224) |
| 319 | 2024319 | 1E-105 >gi\|2286069 (U72155) beta- |
| | | glucosidase [Arabidopsis thaliana] Length = 528 |
| 320 | 2024320 | 2E-18 >sp\|P43349\|TCTP_SOLTU TRANS- |
| | | LATIONALLY CONTROLLED TUMOR |
| | | PROTEIN HOMOLOG (TCTP) |
| | | (P23) >gi\|1072463\|pir\|\|A38959 IgE- |
| | | dependent histamine-releasing factor homolog - potato |
| | | >gi\|587546\|emb\|CAA85519\| (Z37160) |
| | | P23 protein [Solanum tuberosum] Length = 168 |
| 321 | 2024321 | Tyr_Phospho_Site(632-638) |
| 322 | 2024322 | 2E-67 >gi\|3785981 (AC005560) major |
| | | latex protein [Arabidopsis thaliana] Length = 151 |
| 323 | 2024323 | 1E-59 >sp\|Q39039\|VATL_ARATH VACUOLAR |
| | | ATP SYNTHASE 16 KD PROTEOLIPID |
| | | SUBUNIT (V-ATPASE 16 |
| | | KD PROTEOLIPID |
| | | SUBUNIT) >gi\|2118221\|pir\|\|S60132 H+-trans- |
| | | porting ATPase (EC 3.6.1.35), vacuolar, 16K chain (clone |
| | | AVA-P2) - Arabidopsis thaliana >gi\|926937 (L44585) |
| | | vacuolar H+-pumping ATPase 16 kDa proteolipid |
| | | [Arabidopsis thaliana] Length = 165 |
| 324 | 2024324 | 3E-55 >gi\|3355475 (AC004218) ribosomal |
| | | protein L23a [Arabidopsis thaliana] Length = 154 |
| 325 | 2024325 | 1E-118 >gi\|2344900 (AC002388) EREBP |
| | | isolog [Arabidopsis thaliana] Length = 226 |
| 326 | 2024326 | 4E-60 >gi\|3128187 (AC004521) beta- |
| | | glucosidase [Arabidopsis thaliana] Length = 506 |
| 327 | 2024327 | 2E-92 >gb\|AAD31339.1\|AC007354_12 (AC007354) |
| | | Similar to gb\|X02844 lipase precursor from |
| | | Staphylococcus hyicus. ESTs gb\|AI239406 and gb\|T76725 |
| | | come from this gene. [Arabidopsis thaliana] |
| | | Length = 473 |
| 328 | 2024328 | 2E-91 >emb\|CAB10172.1\| (Z97335) hydroxy- |
| | | methyltransferase [Arabidopsis |
| | | thaliana] Length = 471 |
| 329 | 2024329 | Tyr_Phospho_Site(586-593) |
| 330 | 2024330 | Tyr_Phospho_Site(76-83) |
| 331 | 2024331 | 1E-64 >dbj\|BAA34728\| (AB008489) response |
| | | regulator 6 [Arabidopsis thaliana] Length = 186 |
| 332 | 2024332 | Rgd(866-868) |
| 333 | 2024333 | Tyr_Phospho_Site(1174-1181) |
| 334 | 2024334 | Tyr_Phospho_Site(729-736) |
| 335 | 2024335 | 3E-84 ) >sp\|P42732\|RR13_ARATH 30S |
| | | RIBOSOMAL PROTEIN S13, |
| | | CHLOROPLAST PRECURSOR |
| | | (CS13) >gi\|2119093\|pir\|\|559594 ribosomal |
| | | protein S13 precursor, chloroplast - Arabidopsis |
| | | thaliana >gi\|16767\|emb\|CAA79013\| |
| | | (Z17611) chloroplast 30S |
| 336 | 2024336 | 8E-68 >sp\|P36210\|R12A_ARATH 60S |
| | | RIBOSOMAL PROTEIN L12-A, |
| | | CHLOROPLAST PRECURSOR |
| | | (CL12-A) >gi\|541895\|pir\|\|A53394 ribosomal |
| | | protein L12.A, chloroplast - Arabidopsis |
| | | thaliana >gi\|468771 \|emb\|CAA48181\| |
| | | (X68046) ribosomal protein L12 [Arabidopsis |
| | | thaliana] Length = 191 |
| 337 | 2024337 | 1E-84 ) >gi\|1657621 (U72505) G6p |
| | | [Arabidopsis thaliana] >gi\|3068711 |
| | | (AF049236) acyl-coA dehydrogenase [Arabidopsis |
| | | thaliana] >gi\|5478795\|jdb\|BAA82478.1\| |
| | | (AB017643) Short-chain acyl Co Aoxidase |
| | | [Arabidopsis thaliana] Length = 436 |
| 338 | 2024338 | Tyr_Phospho_Site(4-12) |
| 339 | 2024339 | 1E-85 >sp\|QO5085\|CHL1_ARATH NI- |
| | | TRATE/CHLORATE |
| | | TRANSPORTER >gi\|1076359\|pir\|\|A45772 |
| | | nitrate-inducible nitrate transporter - Arabidopsis |
| | | thaliana >gi\|166668 (L10357) CHL1 [Arabidopsis |
| | | thaliana] >gi\|3157921 (AC002131) Identical |
| | | to nitrate/chlorate transporter cDNA gb\|L10357 from |
| | | A. thaliana. ESTs gb\|H37533 and gb\|R29790, |
| | | gb\|T46117, gb\|T46068, gb\|T75688, gb\|R29817, |
| | | gb\|R29862, gb\|Z34634 and gb\|Z34258 come |
| | | from this gene. [Arabidopsis thaliana] Length = 590 |
| 340 | 2024340 | Tyr_Phospho_Site(40-47) |
| 341 | 2024341 | 2E-16 >emb\|CAB43916.1\| (AL078470) glycine- |
| | | rich protein like [Arabidopsis thaliana] |
| | | Length = 158 |
| 342 | 2024342 | 1E-106 >gb\|AAD31061.1\|AC007357_10 (AC007357) |
| | | Identical to gb\|D78605 cytochrome P450 mono- |
| | | oxygenase from Arabidopsis thaliana and is a member |
| | | of the PF\|00067 Cytochrome P450 family. ESTs |
| | | gb\|Z18072, gbjZ35218 and gb\|T43466 come from t |
| 343 2024343 | 1E-114 >sp\|P20363\|TBA3_ARATH TUBULIN | |
| | | ALPHA-3/ALPHA-5 |
| | | CHAIN >gi\|99768\|pir\|\|A32712 tubulin alpha-5 |
| | | chain - Arabidopsis thaliana >gi\|166912 |
| | | (M17189) alpha-tubulin [Arabidopsis |
| | | thaliana] >gi\|166918 (M84698) alpha-5 |
| | | tubulin [Arabido |
| 344 | 2024344 | 2E-99 ) >sp\|P10796\|RBS2_ARATH RIBULOSE |
| | | BISPHOSPHATE CARBOXYLASE SMALL CHAIN |
| | | 1 B PRECURSOR (RUBISCO SMALL SUBUNIT |
| | | 1 B) >gi\|68062\|pir\|\|RKMUB1 ribulose-bisphosphate |
| | | carboxylase (EC 4.1.1.39) small chain Bi precursor - |
| | | Arabidopsis th |
| 345 | 2024345 | 2E-61 >dbj\|BAA33810.1\| (AB018441) phi-1 |
| | | [Nicotiana tabacum] Length = 313 |
| 346 | 2024346 | 2E-58 >gb\|AAD48837.1\|AF166351_1 (AF166351) |
| | | alanine:glyoxylate aminotransferase 2 homolog |
| | | [Arabidopsis thaliana] Length = 476 |
| 347 | 2024347 | Tyr_Phospho_Site(305-312) |
| 348 | 2024348 | Pkc_Phospho_Site(118-120) |
| 349 | 2024349 | Zinc_Finger C2h2(14-35) |
| 350 | 2024350 | Tyr_Phospho_Site(601-608) |
| 351 | 2024351 | 8E-40 >emb\|CAB36810.1\| (AL035527) |
| | | spliceosome associated protein-like |
| | | [Arabidopsis thaliana] Length = 700 |
| 352 | 2024352 | Pkc_Phospho_Site(65-67) |
| 353 | 2024353 | 5E-86 >emb\|CAA67334\| (X98802) peroxi- |
| | | dase ATP11 a [Arabidopsis thaliana] >gi\|2388572 |
| | | (AC000098) Strong similarity to Arabidopsis |
| | | peroxidase ATP11A (gb\|X98802). [Arabidopsis |
| | | thaliana] >gi\|2388573 (AC000098) Strong |
| | | similarity to Arabidopsis peroxidase ATP11A |
| | | (gb\|X98802). [Arabidopsis thaliana] |
| | | Length = 325 |
| 354 | 2024354 | Tyr_Phospho_Site(846-853) |
| 355 | 2024355 | 3E-52 ) >gb\|AAD57002.1\|AC009465_16 (AC009465) |
| | | zeta-carotene desaturase precursor [Arabidopsis |
| | | thaliana] Length = 558 |
| 356 | 2024356 | 1E-147 >sp\|P30302\|WC2C_ARATH PLASMA |
| | | MEMBRANE INTRINSIC PROTEIN 2C |
| | | (WATER-STRESS INDUCED TONOPLAST |
| | | INTRINSIC PROTEIN) |
| | | (WSI-TIP) >gi\|2l 7869\|dbj\|BAA02520\| (D13254) |
| | | transmembrane channel protein [Arabidopsis |
| | | thaliana] >gi\|4371283\|g |
| 357 | 2024357 | Pkc_Phospho_Site(107-109) |
| 358 | 2024358 | Pkc_Phospho_Site(78-80) |
| 359 | 2024359 | Tyr_Phospho_Site(1075-1083) |
| 360 | 2024360 | 4E-32 >gb\|AAD39286.1\|AC007576_9 (AC007576) |
| | | Similar to protein kinases [Arabidopsis |
| | | thaliana] Length = 438 |
| 361 | 2024361 | 1E-95 >emb\|CAA18833.1\| (AL023094) isoflavone |
| | | reductase-like protein [Arabidopsis thaliana] |
| | | Length = 306 |
| 362 | 2024362 | Tyr_Phospho_Site(433-441) |
| 363 | 2024363 | Tyr_Phospho_Site(156-163) |
| 364 | 2024364 | 3E-93 >sp\|P42796\|R112_ARATH 60S |
| | | RIBOSOMAL PROTEIN L11B |
| | | (L16B) >gi\|550547\|emb\|CAA57396\| (X81800) |
| | | ribosomal protein L16 [Arabidopsis |
| | | thaliana] >gi\|4539392\|emb\|CAB37458.1\| |
| | | (AL035526) ribosomal protein L11, cytosolic |
| | | [Arabidopsis thaliana] Length = 184 |
| 365 | 2024365 | Tyr_Phospho_Site(250-258) |
| 366 | 2024366 | 0 >emb\|CAB40990.1 \| (AL049640) pollen |
| | | surface protein [Arabidopsis thaliana] |
| | | Length = 403 |
| 367 | 2024367 | 6E-89 >emb\|CAA10321\| (AJ131206) |
| | | microbody NAD-dependent malate dehydrogenase |
| | | [Arabidopsis thaliana] Length = 354 |
| 368 | 2024368 | 5E-33 >sp\|O48609\|Y65L_HORVU YCF65-LIKE |
| | | PROTEIN PRECURSOR >gi \|2695931\|emb\|CAA10984\| |
| | | (AJ222779) hypothetical protein [Hordeum vulgare] |
| | | Length = 181 |
| 369 | 2024369 | 4E-14 >gb\|AAD39463.1\|AF135439_1 (AF135439) |
| | | formin binding protein 11 [Mus musculus] |
| | | Length = 953 |
| 370 | 2024370 | Tyr_Phospho_Site(495-502) |
| 371 | 2024371 | Pkc_Phospho_Site(19-21) |
| 372 | 2024372 | 3E-22 >sp\|P25070\|TCH2_ARATH CAL- |
| | | MODULIN-RELATED PROTEIN 2, |
| | | TOUCH-INDUCED >gi\|2583169 (AF026473) |
| | | calmodulin-related protein [Arabidopsis |
| | | thaliana] Length = 161 |
| 373 | 2024373 | 1E-142 >sp\|P35614\|ERF1_ARATH EUKARY- |
| | | OTIC PEPTIDE CHAIN RELEASE FACTOR |
| | | SUBUNIT 1 (ERF1) (OMNIPOTENT SUPPRESSOR |
| | | PROTEIN 1 HOMOLOG) (SUP1 |
| | | HOMOLOG) >gi\|322554\|pir\|\|S31328 omnipotent |
| | | suppressor protein SUP1 homolog (clone G18) - Arabidopsis |
| | | thaliana >gi\|16514\|emb\|CAA49172\| (X69375) |
| | | similar to yeast omnipotent suppressor protein SUP1 |
| | | (SUP45) [Arabidopsis |
| | | thaliana] >gi\|1402882\|emb\|CAA66813\| |
| | | (X98130) eukaryotic early release factor subunit 1-like |
| | | protein [Arabidopsis |
| | | thaliana] >gi\|1495249\|emb\|CAA66118\| |
| | | (X97486) eRF1-3 [Arabidopsis thaliana] |
| | | Length = 435 |
| 374 | 2024374 | 1E-1 11 >sp\|O04486\|RB1C_ARATH RAS- |
| | | RELATED PROTEIN RAB11C >gi\|2160157 |
| | | (AC000132) Strong similarity to A. thaliana ara-2 |
| | | (gb\|ATHARA2). ESTs |
| | | gb\|ATT52483,gb\|ATTS2484,gb\|AA042159 |
| | | come from this gene. [Arabidopsis |
| | | thaliana] >gi\|2231303 (U74669) ras-related small |
| | | GTPase [Arabidopsis thaliana] Length = 217 |
| 375 | 2024375 | 1E-53 >emb\|CAA74054\| (Y13726) Tran- |
| | | scription factor [Arabidopsis thaliana] Length = 155 |
| 376 | 2024376 | Tyr_Phospho_Site(1219-1225) |
| 377 | 2024377 | 1E-148 >pir\|\|FKMUA phytochrome A- |
| | | Arabidopsis thaliana >gi\|16421 \|emb\|CAA35221\| |
| | | (X17341) phyA photoreceptor [Arabidopsis thaliana] |
| | | Length = 1122 |
| 378 | 2024378 | Pkc_Phospho_Site(97-99) |
| 379 | 2024379 | 7E-89 >sp\|QO1474\|SARB_ARATH GTP-BINDING |
| | | PROTEIN SAR1B >gi\|322517\|pir\|\|528603 GTP- |
| | | binding protein - Arabidopsis thaliana >gi\|166734 |
| | | (M95795) GTP-binding protein [Arabidopsis thaliana] |
| | | Length = 193 |
| 380 | 2024380 | 3E-86 >sp\|P51412\|RK21_ARATH 50S |
| | | RIBOSOMAL PROTEIN L21, |
| | | CHLOROPLAST PRECURSOR |
| | | (CL21) >gi\|2129718\|pir\|\|S71282 ribosomal |
| | | protein L21 - Arabidopsis |
| | | thaliana >gi\|1149573\|emb\|CAA89887\| |
| | | (Z49787) chloroplast ribosomal large subunit protein |
| | | L21 [Arabidopsis thaliana] Length = 220 |
| 381 | 2024381 | Tyr_Phospho_Site(597-604) |
| 382 | 2024382 | 1E-20 >gb\|AAD46412.1\|AF096262_{‘3}1 (AF096262) |
| | | ER6 protein [Lycopersicon esculentum] |
| | | Length = 168 |
| 383 | 2024383 | 3E-69 >pir\|\|S51699 oleoyl-[acyl-carrier-protein] |
| | | hydrolase (EC 3.1.2.14) - Arabidopsis |
| | | thaliana >gi\|804948\|emb\|CAA85388\| (Z36911) |
| | | acyl-(acyl carrier protein) thioesterase [Arabidopsis |
| | | thaliana] Length = 412 |
| 384 | 2024384 | Tyr_Phospho_Site(1364-1370) |
| 385 | 2024385 | Tyr_Phospho_Site(321-328) |
| 386 | 2024386 | 1E-47 >gi\|2435522 (AF024504) contains |
| | | similarity to other AMP-binding enzymes |
| | | [Arabidopsis thaliana] Length = 480 |
| 387 | 2024387 | 2E-62 >emb\|CAA63012\| (X91919) LEA76 |
| | | homologue typel [Arabidopsis |
| | | thaliana] >gi\|5903037\|gb\|AAD55596.1\|AC008016_6 |
| | | (AC008016) Identical to gb\|X91919 LEA76 homologue |
| | | type1 from Arabidopsis thaliana. ESTs gb\|N97082, |
| | | gb\|Z27056 and gb\|Z29902 come from this gene. |
| | | Length = 169 |
| 388 | 2024388 | 3E-79 >gb\|AAD28242.1\|AF121355_1 (AF121355) |
| | | peroxiredoxin TPx1 [Arabidopsis thaliana] |
| | | Length = 162 |
| 389 | 2024389 | 7E-92 >gi\|3790567 (AF078821) RING-H2 |
| | | finger protein RHA1b [Arabidopsis thaliana] |
| | | Length = 157 |
| 390 | 2024390 | Tyr_Phospho_Site(726-733) |
| 391 | 2024391 | 1E-130 >emb\|CAA16760.1\| (AL021711) |
| | | nodulin-26-like protein [Arabidopsis |
| | | thaliana] Length = 241 |
| 392 | 2024392 | Pkc_Phospho_Site(20-22) |
| 393 | 20243936 | E-57 >gi\|1256595 (U38915) LytB |
| | | [Synechocystis PCC6803] Length = 379 |
| 394 | 2024394 | 1E-1 36 >gi\|3980396 (AC004561) C-4 sterol |
| | | methyl oxidase [Arabidopsis thaliana] |
| | | Length = 253 |
| 395 | 2024395 | Tyr_Phospho_Site(230-237) |
| 396 | 20243962 | E-62 >gi\|1353352 (U31975) alanine |
| | | aminotransferase [Chlamydomonas reinhardtii] |
| | | Length = 521 |
| 397 | 2024397 | 3E-57 >gi\|3004557 (AC003673) plasma |
| | | membrane proton pump H+ ATPase, PMA1 |
| | | [Arabidopsis thaliana] Length = 949 |
| 398 | 2024398 | 6E-81 ) >sp\|Q03509\|CAL6_ARATH CAL- |
| | | MODULIN-6 >gi\|1076298\|pir\|\|S35187 calmodulin 6 - |
| | | Arabidopsis thaliana >gi\|16227\|emb\|CAA78059\| |
| | | (Z12024) calmodulin [Arabidopsis thaliana] |
| | | Length = 149 |
| 399 | 2024399 | 8E-74 >dbj\|BAA74839\| (AB007801) |
| | | cytochrome b5 [Arabidopsis thaliana] |
| | | Length = 134 |
| 400 | 2024400 | Tyr_Phospho_Site(35-41) |
| 401 | 2024401 | Tyr_Phospho_Site(232-239) |
| 402 | 2024402 | 2E-1 3 >gb\|AAD15432\| (AC006218) non- |
| | | specific lipid-transfer protein precursor [Arabidopsis |
| | | thaliana] >gi\|4726121\|gb\|AAD2832.1\| |
| | | AC006436_12 (AC006436) nonspecific lipid-transfer |
| | | protein precursor [Arabidopsis thaliana] |
| | | Length = 169 |
| 403 | 2024403 | 3E-11 >gi\|4063742 (AC005851) phaseolin |
| | | G-box binding protein [Arabidopsis thaliana] |
| | | Length = 320 |
| 404 | 2024404 | IE-120 >gi\|4204697 (AF117063) inositol |
| | | polyphosphate 5-phosphatase At5P2 [Arabidopsis |
| | | thaliana] Length = 646 |
| 405 | 2024405 | 2E-63 >sp\|P20363 \|TBA3_ARATH TUBULIN |
| | | ALPHA-3/ALPHA-5 |
| | | CHAIN >gi\|99768\|pir\|\|A32712 |
| | | tubulin alpha-5 chain - Arabidopsis |
| | | thaliana >gi\|166912 (M17189) alpha-tubulin |
| | | [Arabidopsis thaliana] >gi\|166918 (M84698) |
| | | alpha-5 tubulin [Arabidopsis thaliana] Length = 450 |
| 406 | 2024406 | 1E-103 >sp\|P10796\|RBS2_ARATH RIBULOSE |
| | | BISPHOSPHATE CARBOXYLASE SMALL |
| | | CHAIN 1B PRECURSOR (RUBISCO SMALL |
| | | SUBUNIT 1B) >gi\|68062\|pir\|\|RKMUB1 |
| | | ribulose-bisphosphate carboxylase (EC 4.1.1.39) |
| | | small chain B1 precursor - Arabidopsis |
| | | thaliana >gi\|16193\|emb\|CAA32700\| |
| | | (X14564) ribulose bisphosphate carboxylase |
| | | [Arabidopsis thaliana] Length = 181 |
| 407 | 2024407 | 8E-17 >sp\|O02414\|DYL1_ANTCR DYNEIN |
| | | LIGHT CHAIN LC6, FLAGELLAR |
| | | OUTER ARM >gi\|2208914\|dbj\|BAA20525\| |
| | | (AB004830) outer arm dynein LC6 |
| | | [Anthocidaris crassispina] Length = 89 |
| 408 | 2024408 | 5E-70 >sp\|P32826\|CBPX_ARATH SERINE |
| | | CARBOXYPEPTIDASE PRECURSOR >gi\|166674 |
| | | (M81130) carboxypeptidase Y-like protein [Arabidopsis |
| | | thaliana] >gi\|445120\|prf\|\|1908426A |
| | | carboxypeptidase Y [Arabidopsis thaliana] |
| | | Length = 539 |
| 409 | 2024409 | 1E-125 >gi\|2288999 (AC002335) electron |
| | | transfer flavoprotein ubiquinone oxidoreductase |
| | | isolog [Arabidopsis thaliana] Length = 633 |
| 410 | 2024410 | 5E-71 >pir\|\|S71238 immunophilin |
| | | FKBP15-2 - Arabidopsis thaliana >gi\|1272408 |
| | | (U52047) immunophilin [Arabidopsis thaliana] |
| | | Length = 163 |
| 411 | 2024411 | Tyr_Phospho_Site(336-343) |
| 412 | 2024412 | Tyr_Phospho_Site(1253-1261) |
| 413 | 2024413 | 2E-83 >gb\|AAC78267.1\|AAC78267 (AC002330) |
| | | cullin-like 1 protein [Arabidopsis thaliana] |
| | | Length = 676 |
| 414 | 2024414 | Tyr_Phospho_Site(483-490) |
| 415 | 2024415 | 4E-70 >emb\|CAA68126\| (X99793) |
| | | induced upon wounding stress |
| | | [Arabidopsis thaliana] Length = 386 |
| 416 | 2024416 | 8E-85 >gb\|AAD24607.1\|AC005825_14 (AC005825) |
| | | ubiquitin-conjugating enzyme E2;GB:T21483 appears |
| | | to be a partially-spliced transcript from this gene |
| | | [Arabidopsis thaliana] Length = 148 |
| 417 | 2024417 | 7E-43 >dbj\|BAA74576\| (AB015906) |
| | | actin-related protein [Homo |
| | | sapiens] >gi\|5880496gb\|AAD54678.1\|AF041475_1 |
| | | (AF041475) BAF53b [Homo sapiens] Length = 426 |
| 418 | 2024418 | 1E-107 >emb\|CAB51064.1\| (AL096856) |
| | | betaine aldehyde dehydrogenase-like protein |
| | | [Arabidopsis thaliana] Length = 503 |
| 419 | 2024419 | 8E-20 >sp\|Q10425\|IF3X_SCHPO PROBABLE |
| | | EUKARYOTIC TRANSLATION |
| | | INITIATION FACTOR 3 SUBUNIT |
| | | 9 >gi\|1256531\|emb\|CAA94637\| (Z70691) |
| | | eukaryotic translation initiation factor 3 beta subunit |
| | | [Schizosaccharomyces pombe] Length = 725 |
| 420 | 2024420 | Pkc_Phospho_Site(39-41) |
| 421 | 2024421 | Pkc_Phospho_Site(12-14) |
| 422 | 2024422 | Tyr_Phospho_Site(781-788) |
| 423 | 2024423 | 1E-95 >gi\|1174162 (U44976) ubiquitin- |
| | | conjugating enzyme [Arabidopsis |
| | | thaliana] >gi\|3746915 (AF091106) |
| | | E2 ubiquitin-conjugating-like enzyme |
| | | [Arabidopsis thaliana] Length = 160 |
| 424 | 2024424 | Tyr_Phospho_Site(1 69-176) |
| 425 | 2024425 | 5E-85 ) >dbj\|BAA36336\| (AB015142) |
| | | AHP2 [Arabidopsis |
| | | thaliana] >gi\|4156241\|dbj\|BAA37110\| |
| | | (AB012568) ATHP1 [Arabidopsis thaliana] |
| | | Length = 156 |
| 426 | 2024426 | 1E-1 69 >sp\|Q43725\|CYSM_ARATH CYSTEINE |
| | | SYNTHASE, MITOCHONDRIAL PRECURSOR |
| | | (O-ACETYLSERINE SULFHYDRYLASE) |
| | | (O-ACETYLSERINE (THIOL)-LYASE) |
| | | (CSASE) >gi\|1488519\|emb\|CAA57498\| |
| | | (X81973) cysteine synthase [Arabidopsis thaliana] |
| | | Length = 424 |
| 427 | 2024427 | 1E-140 >gi\|2586125 (U89512) b-keto |
| | | acyl reductase [Arabidopsis |
| | | thaliana] Length = 253 |
| 428 | 2024428 | Tyr_Phospho_Site(247-254) |
| 429 | 2024429 | 8E-15 >emb\|CAB41927.1\| (AL049751) |
| | | ribosmal protein L13a like protein [Arabidopsis |
| | | thaliana] Length = 206 |
| 430 | 2024430 | Tyr_Phospho_Site(1028-1036) |
| 431 | 2024431 | 1E-108 >emb\|CAB41927.1\| (AL049751) |
| | | ribosomal protein L13a like protein |
| | | [Arabidopsis thaliana] Length = 206 |
| 432 | 2024432 | 3E-21 >gi\|3327394 (AC004483) |
| | | RNA helicase [Arabidopsis thaliana] |
| | | Length = 845 |
| 433 | 2024433 | 1E-105 >emb\|CAA18824.1\| (AL023094) |
| | | Nonclathrin coat protein gamma- like protein |
| | | [Arabidopsis thaliana] Length = 831 |
| 434 | 2024434 | Pkc_Phospho_Site(79-81) |
| 435 | 2024435 | 7E-98 >dbj\|BAA34687\| (AB016819) |
| | | UDP-glucose glucosyltransferase |
| | | [Arabidopsis thaliana] Length = 481 |
| 436 | 2024436 | 1E-99 ) >gi\|2342734 (AC002341) |
| | | DNA-binding protein isolog |
| | | [Arabidopsis thaliana] Length = 170 |
| 437 | 2024437 | 1E-Si >sp\|P12357\|PSAG_SPIOL PHOTO- |
| | | SYSTEM I REACTION CENTRE |
| | | SUBUNIT V PRECURSOR |
| | | (PHOTOSYSTEM 19 KD PROTEIN) |
| | | (PSI-G) >gi\|72686\|pir\|\|F1SP5 |
| | | photosystem I chain V precursor - |
| | | spinach >gi\|21299\|emb\|CAA315241 (X13134) |
| | | PSI subunit V p |
| 438 | 2024438 | Pkc_Phospho_Site(5-7) |
| 439 | 2024439 | 2E-44 >gi\|2558962 (AF025667) |
| | | histone H2B1 [Gossypium hirsutum] |
| | | Length = 147 |
| 440 | 2024440 | 3E-83 >emb\|CAB10419.1\| (Z97341) |
| | | transcription factor like protein |
| | | [Arabidopsis thaliana] Length = 467 |
| 441 | 2024441 | 4E-82 >gi\|3983125 (AF097648) |
| | | phosphate/triose-phosphate translocator |
| | | precursor [Arabidopsis thaliana] Length = 410 |
| 442 | 2024442 | Pkc_Phospho_Site(8-10) |
| 443 | 2024443 | Tyr_Phospho_Site(705-712) |
| 444 | 2024444 | Tyr_Phospho_Site(508-516) |
| 445 | 2024445 | 1E-52 >gb\|AAD03445.1\| (AF118223) |
| | | contains similarity to Helicobacter pylori |
| | | peptide methionine sulfoxide reductase (msrA) |
| | | (GB:AE000542) [Arabidopsis |
| | | thaliana] Length = 155 |
| 446 | 2024446 | 1E-133 >gi\|3482914 (AC003970) |
| | | Similar to nodulins and lipase |
| | | [Arabidopsis thaliana] Length = 370 |
| 447 | 2024447 | 2E-13 >sp\|P09970\|PSBI_TOBAC PHOTO- |
| | | SYSTEM II REACTION CENTER I |
| | | PROTEIN (PSII 4.8 KD |
| | | PROTEIN) >gi\|72694\|pir\|\|F2NTI |
| | | photosystem II protein psbI - common tobacco |
| | | chloroplast >gi\|81726\|pir\|\|S07877 |
| | | photosystem II protein psbI - white mustard |
| | | chloroplast >gi\|82558\|pir\|\|JN0315 |
| | | photosystem II protein psbI - rye |
| | | chloroplast >gi\|82631\|pir\|\|S01044 |
| | | photosystem II protein psbl - wheat |
| | | chloroplast >gi\|1363581\|pir\|\|S58S35 |
| | | photosystem II protein psbl - maize |
| | | chloroplast >gi\|12541\|emb\|CAA35617\| |
| | | (X17616) I polypeptide (AA 1-36) [Sinapis |
| | | alba] >gi\|14226\|emb\|CAA43849\| |
| | | (X61674) I protein [Secale |
| | | cereale] >gi\|14257\|emb\|CAA30562\| |
| | | (X07742) ORE 35 (AA 1-36) [Triticum |
| | | aestivum] >gi\|902205\|emb\|CAA60269\| |
| | | (X86563) PSII I protein [Zea |
| | | mays] >gi\|5881678\|dbj\|BAA84369.1\| |
| | | (AP000423) PSII I protein [Arabidopsis thaliana] |
| | | Length = 36 |
| 448 | 2024448 | 1E-126 >gi\|2642443 (AC002391) |
| | | cytochrome P450 [Arabidopsis |
| | | thaliana] Length = 516 |
| 449 | 2024449 | Tyr_Phospho_Site(1097-1103) |
| 450 | 2024450 | 5E-69 >sp\|P42798\|RS1A_ARATH 40S |
| | | RIBOSOMAL PROTEIN S15A >gi\|440824 |
| | | (L27461) ribosomal protein 515 [Arabidopsis |
| | | thaliana] >gi\|2150130 (AF001412) |
| | | cytoplasmic ribosomal protein S15a |
| | | [Arabidopsis thaliana] Length = 130 |
| 451 | 2024451 | Tyr_Phospho_Site(383-391) |
| 452 | 2024452 | Tyr_Phospho_Site(1136-1142) |
| 453 | 2024453 | Tyr_Phospho_Site(1164-1170) |
| 454 | 2024454 | 1E-1 16 >gb\|AAD24830.1\|AC007071_2 |
| | | (AC007071) RING finger protein |
| | | [Arabidopsis thaliana] Length = 565 |
| 455 | 2024455 | 1E-58 >gb\|AAD201381 (AC006282) |
| | | 60S ribosomal protein L24 [Arabidopsis |
| | | thaliana] >gi\|4581159\|gb\|AAD24643.1\|AC006919_21 |
| | | (AC006919) 60S ribosomal protein L24 |
| | | [Arabidopsis thaliana] Length = 177 |
| 456 | 2024456 | Tyr_Phospho_Site(194-201) |
| 457 | 2024457 | 1E-92 >pir\|\|S71217 glutamate |
| | | dehydrogenase 1 - Arabidopsis |
| | | thaliana >gi\|1098960 (U37771) glutamate |
| | | dehydrogenase 1 [Arabidopsis |
| | | thaliana] >gi\|1293095 (U53527) glutamate |
| | | dehydrogenase 1 [Arabidopsis thaliana] |
| | | Length = 411 |
| 458 | 2024458 | 4E-98 >gi\|3885328 (AC005623) |
| | | senine/threonine protein kinase |
| | | [Arabidopsis thaliana] Length = 441 |
| 459 | 2024459 | 2E-43 >gi\|3687237 (AC005169) |
| | | Cys3His zinc-finger protein [Arabidopsis |
| | | thaliana] Length = 359 |
| 460 | 2024460 | Tyr_Phospho_Site(862-868) |
| 461 | 2024461 | 8E-62 >gi\|3776558 (AC005388) |
| | | Identical to gb\|L14814 DNA for tissue- |
| | | specific acyl carrier protein isoform 2 from A. thaliana. |
| | | ESTs gb\|AA5973S1, gb\|T41805, gb\|H36871, |
| | | gb\|R30210, gb\|AA042549, gb\|Z47650, gb\|H76304 |
| | | and gb\|AA597348 come from this gene. [Arabidopsi... |
| | | Length = 136 |
| 462 | 2024462 | 2E-55 >gi\|3776561 (AC005388) |
| | | Identical to DNA for acyl carrier protein |
| | | (ACP) gene A2 gb\|X57699 from A. thaliana. |
| | | ESTs gb\|W43252, gb\|T42821, gb\|N65229, |
| | | gb\|N97267, gb\|F15491 and gb\|AA040955 |
| | | come from this gene. |
| | | [Arabidopsis thaliana] Length = 136 |
| 463 | 2024463 | 5E-82 >gi\|2668744 (AF034946) |
| | | ubiquitin conjugating enzyme [Zea mays] |
| | | Length = 148 |
| 464 | 2024464 | 2E-35 >gi\|4097569 (U64915) |
| | | GMFP4 [Glycine max] Length = 111 |
| 465 | 2024465 | Tyr_Phospho_Site(357-364) |
| 466 | 2024466 | 4E-30 >emb\|CAB39595.1\| (AL049480) |
| | | ribosomal protein Sb [Arabidopsis |
| | | thaliana] Length = 177 |
| 467 | 2024467 | 6E-99 ) >gb\|AAC26008.1\| (AF076251) |
| | | calcineurin B-like protein 1 |
| | | [Arabidopsis thaliana] Length = 213 |
| 468 | 2024468 | Pkc_Phospho_Site(40-42) |
| 469 | 2024469 | Tyr_Phospho_Site(125-132) |
| 470 | 2024470 | Zinc_Protease(124-133) |
| 471 | 2024471 | 1E-110 >sp\|O23654\|VATA_ARATH VACUOLAR |
| | | ATP SYNTHASE CATALYTIC |
| | | SUBUNIT A (V-ATPASE 69 KD |
| | | SUBUNIT) >gi\|2266990 (U65638) vacuolar type |
| | | ATPase subunit A [Arabidopsis |
| | | thaliana] >gi\|3834305 (AC005679) |
| | | Identical to gb\|U65638 Arabidopsis thaliana |
| | | vacuolar type ATPase subunit A mRNA. ESTs |
| | | gb\|N96435, gb\|N96106, gb\|N96189, gb\|N96091, |
| | | gb\|AA042286, gb\|F14324, gb\|W43643, gb\|N96027, |
| | | gb\|N96299, gb\|R29943, gb\|T43460, gb\|T43544, |
| | | gb\|T22472... Length = 623 |
| 472 | 2024472 | 3E-73 >sp\|Q42449\|PRO1_ARATH PROFILIN |
| | | 1 (ALLERGEN ARA T 8) >gi\|2981657\|pdb\|1AOK\| |
| | | Profilin I From Arabidopsis Thaliana >gi\|1353763 |
| | | (U43322) profilin 1 [Arabidopsis |
| | | thaliana] >gi\|1353770 (U43325) profilin 1 |
| | | [Arabidopsis thaliana] >gi\|1835878\|bbs\|179026 |
| | | (S82691) profilin isoform I [Arabidopsis thaliana, |
| | | Columbia, flowers, Peptide, 131 aa] [Arabidopsis |
| | | thaliana] >gi\|3687242 (AC005169) |
| | | profilin 1 [Arabidopsis thaliana] Length = 131 |
| 473 | 2024473 | 3E-13 >gb\|AAD15432\| (AC006218) |
| | | nonspecific lipid-transfer protein |
| | | precursor [Arabidopsis |
| | | thaliana] >gi\|4726121\|gb\|AAD28321.1\|AC006436_12 |
| | | (AC006436) nonspecific lipid-transfer protein precursor |
| | | [Arabidopsis thaliana] Length = 169 |
| 474 | 2024474 | 1E-117 >gb\|AAD14532\| (AC006200) |
| | | membrane transporter [Arabidopsis |
| | | thaliana] Length = 725 |
| 475 | 2024475 | 1E-102 >pir\|\|S51b69 amino acid transporter |
| | | AAP4 - Arabidopsis thaliana >gi\|608671 \|emb\|CAA54631\| |
| | | (X77500) amino acid transporter Arabidopsis |
| | | thaliana] Length = 466 |
| 476 | 2024476 | 4E-90 >gb\|AAD31589.1\|AC006922_21 (AC006922) |
| | | phenylalanine ammonia |
| | | lyase [Arabidopsis thaliana] Length = 725 |
| 477 | 2024477 | 2E-54 >emb\|CAA63223\| (X92491) TOM20 |
| | | [Solanum tuberosum] Length = 204 |
| 478 | 2024478 | Tyr_Phospho_Site(169-176) |
| 479 | 2024479 | Tyr_Phospho_Site(1199-1206) |
| 480 | 2024480 | Pkc_Phospho_Site(39-41) |
| 481 | 2024481 | Pkc_Phospho_Site(114-116) |
| 482 | 2024482 | Pkc_Phospho_Site(88-90) |
| 483 | 2024483 | Tyr_Phospho_Site(215-222) |
| 484 | 2024484 | 1E-100 >gi\|2829925 (AC002291) |
| | | Similar to dnaj-like protein, |
| | | gp\|Y11969\|2230757 [Arabidopsis |
| | | thaliana] Length = 351 |
| 485 | 2024485 | Tyr_Phospho_Site(652-659) |
| 486 | 2024486 | Pkc_Phospho_Site(69-71) |
| 487 | 2024487 | Tyr_Phospho_Site(1277-1284) |
| 488 | 2024488 | 2E-45 >emb\|CAA7O691\| (Y09482) |
| | | HMG1 [Arabidopsis |
| | | thaliana] >gi\|2832361 \|emb\|CAA74402.1\| |
| | | (Y14073) HMG protein [Arabidopsis thaliana] |
| | | Length = 141 |
| 489 | 2024489 | 6E-b 4 >sp\|P301851DH18_ARATH DEHYDRIN |
| | | RAB18 >gi\|282880\|pir\|\|S28021 rabi 8 protein - |
| | | Arabidopsis thaliana >gi\|16451 \|emb\|CAA48178\| |
| | | (X68042) RAB18 [Arabidopsis thaliana] |
| | | Length = 186 |
| 490 | 2024490 | 5E-37 >gi\|451193 (L28008) wali7 [Triticum |
| | | aestivum] >gi\|1090845\|prf\|\|2019486B |
| | | wali7 gene [Triticum aestivum] Length = 270 |
| 491 | 2024491 | Tyr_Phospho_Site(144-150) |
| 492 | 2024492 | 1E-85 >gi\|3860272 (AC005824) |
| | | suppressor protein [Arabidopsis |
| | | thaliana] >gi14314399\|gb\|AAD15609\| |
| | | (AC006232) skd1 protein [Arabidopsis |
| | | thaliana] Length = 435 |
| 493 | 2024493 | Tyr_Phospho_Site(1021-1028) |
| 494 | 2024494 | 1E-94 >emb\|CAA11858\| (AJ224161) |
| | | delta-8 sphingolipid desaturase |
| | | [Arabidopsis thaliana] Length = 449 |
| 495 | 2024495 | Tyr_Phospho_Site(1009-1016) |
| 496 | 2024496 | Tyr_Phospho_Site(62-69) |
| 497 | 2024497 | 1E-88 ) >gi\|3980405 (AC004561) tropinone |
| | | reductase [Arabidopsis thaliana] |
| | | Length = 262 |
| 498 | 2024498 | 9E-47 >sp\|P55852\|SMT3_ARATH UBIQUI- |
| | | TIN-LIKE PROTEIN |
| | | SMT3 >gi\|1707372\|emb\|CAA67923\| (X99609) |
| | | ubiquitin-like protein [Arabidopsis thaliana] |
| | | Length = 104 |
| 499 | 2024499 | 3E-11 >sp\|O04886\|PME1_CITSI PEC- |
| | | TINESTERASE 1.1 PRECURSOR |
| | | (PECTIN METHYLESTERASE) |
| | | (PE) >gi\|2098705 (U82973) pectinesterase |
| | | [Citrus sinensis] Length = 584 |
| 500 | 2024500 | 1E-66 >pir\|\|S58491 IAA3 |
| | | protein - Arabidopsis thaliana >gi\|972911 |
| | | (U18406) IAA3 [Arabidopsis |
| | | thaliana] >gi\|1903369\|gb\|AAB70452\| |
| | | (AC000104) Match to Arabidopsis IAA3 (gb\|U18406). |
| | | EST gb\|T04296 comes from this gene. |
| | | [Arabidopsis thaliana] Length = 189 |
| 501 | 2024501 | Rgd(875-877) |
| 502 | 2024502 | Tyr_Phospho_Site(43-50) |
| 503 | 2024503 | 1E-74 ) >sp\|P46313\|FD6E_ARATH OMEGA-6 |
| | | FATTY ACID DESATURASE, |
| | | ENDOPLASMIC RETICULUM (DELTA-12 |
| | | DESATURASE) >gi\|438451 (L26296) |
| | | delta-12 desaturase [Arabidopsis thaliana] |
| | | Length = 383 |
| 504 | 2024504 | 2E-88 ) >gi\|3785982 (AC005560) |
| | | major latex protein [Arabidopsis |
| | | thaliana] Length = 151 |
| 505 | 2024505 | Tyr_Phospho_Site(523-529) |
| 506 | 2024506 | Tyr_Phospho_Site(706-714) |
| 507 | 2024507 | 3E-80 >sp\|Q03510\|CAL4_ARATH CAL- |
| | | MODULIN-4 >gi\|479693\|pir\|\|535185 |
| | | calmodulin 4 - Arabidopsis |
| | | thaliana >gi\|16223\|emb[CAA78057\| |
| | | (Z12022) calmodulin [Arabidopsis thaliana] |
| | | Length = 149 |
| 508 | 2024508 | Tyr_Phospho_Site(156-162) |
| 509 | 2024509 | 1E-91 >gi\|2739389 (AC002505) |
| | | Cf-2.2 like protein [Arabidopsis thaliana] |
| | | Length = 480 |
| 510 | 2024510 | 1E-45 >gi\|3236242 (AC004684) 60S |
| | | ribosomal protein L36 [Arabidopsis |
| | | thaliana] Length = 113 |
| 511 | 2024511 | 8E-40 >emb\|CAA23O37.1\| (AL035394) |
| | | V-ATPase subunit G (vag2 gene) |
| | | [Arab idopsis thaliana] Length = 106 |
| 512 | 2024512 | Tyr_Phospho_Site(1042-1049) |
| 513 | 2024513 | Tyr_Phospho_Site(563-570) |
| 514 | 2024514 | 4E-50 >gi\|2829918 (AC002291) |
| | | similar to tub protein gp\|U82468\|2072162 |
| | | [Arabidopsis thaliana] Length = 455 |
| 515 | 2024515 | 1E-81 >emb\|CAB43885.1\| (AL078468) |
| | | acyl-CoA synthetase-like protein |
| | | [Arabidopsis thaliana] Length = 666 |
| 516 | 2024516 | Tyr_Phospho_Site(481-488) |
| 517 | 2024517 | Tyr_Phospho_Site(274-281) |
| 518 | 2024518 | Tyr_Phospho_Site(1095-1103) |
| 519 | 2024519 | Tyr_Phospho_Site(1315-1322) |
| 520 | 2024520 | Tyr_Phospho_Site(71-79) |
| 521 | 2024521 | 7E-31 >ref\|NP_003282.1\|PTPP2\| tripeptidyl |
| | | peptidase II >gi\|136107\|sp\|P29144\|TPP2_HUMAN |
| | | TRIPEPTIDYL-PEPTIDASE II (TPP II) |
| | | (TRIPEPTIDYL AMINOPEPTI- |
| | | DASE) >gi\|1082875\|pir\|\|S54376 tri- |
| | | peptidyl-peptidase II (EC 3.4.14.10) - |
| | | human >gi\|339880 (M73047) tripeptidyl peptidase II |
| | | [Homo sapiens] Length = 1249 |
| 522 | 2024522 | 1E-92 >pir\|\|S71252 lectin- |
| | | like protein - Arabidopsis |
| | | thaliana >gi\|995619\|emb\|CAA62665\| |
| | | (X91259) lectin like protein [Arabidopsis thaliana] |
| | | Length = 272 |
| 523 | 2024523 | 3E-25 >emb\|CAA16566\| (AL021635) |
| | | DNA binding protein [Arabidopsis |
| | | thaliana] Length = 324 |
| 524 | 2024524 | 8E-67 >sp\|Q38904\|PRO3_ARATH PROFILIN |
| | | 3 >gi\|1353765 (U43323) profilin |
| | | 3 [Arabidopsis thaliana] Length = 134 |
| 525 | 2024525 | 1E-38 >gi\|2565436 (AF028842) |
| | | DegP protease precursor [Arabidopsis |
| | | thaliana] Length = 437 |
| 526 | 2024526 | 2E-72 >emb\|CAB54877.1\| (AL117188) |
| | | ribosomal protein L11 homolog |
| | | [Arabidopsis thaliana] Length = 155 |
| 527 | 2024527 | 1E-28 >gb\|AAD55594.1\|AC008016_4 (AC008016) |
| | | Similar to gb\|D85381 cytochrome c oxidase subunit |
| | | Vb precursor from Oryza sativa. ESTs gb\|R30504 |
| | | and gb\|AA598195 come from this gene. |
| | | [Arabidopsis thaliana] Length = 102 |
| 528 | 2024528 | 1E-100 ) >gi\|1345132 (U47029) |
| | | ERECTA [Arabidopsis |
| | | thaliana] >gi\|1389566\|dbj\|BAA11869\| |
| | | (D83257) receptor protein kinase [Arabidopsis |
| | | thaliana] >gi\|3075386 (AC004484) |
| | | receptor protein kinase, ERECTA [Arabidopsis |
| | | thaliana |
| 529 | 2024529 | Pkc_Phospho_Site(241-243) |
| 530 | 2024530 | Tyr_Phospho_Site(913-921) |
| 531 | 2024531 | 6E-58 >gi\|4218987 (AF098630) |
| | | cell wall-plasma membrane disconnecting |
| | | CLCT protein [Arabidopsis |
| | | thaliana] >gi\|4725954\|emb\|CAB41725.1\| |
| | | (AL049730) cell wall-plasma membrane disconnecting |
| | | CLOT protein (AIR1A) |
| | | [Arabidopsis thaliana] Length = 111 |
| 532 | 2024532 | 6E-66 >emb\|CAA90703\| (Z50851) HD-zip |
| | | [Arabidopsis thaliana] Length = 833 |
| 533 | 2024533 | 6E-19 >ref\|NP_006214.1\|PPIN4\| protein |
| | | (peptidyl-prolyl cis/trans isomerase) |
| | | NIMA-interacting, 4 |
| | | (parvulin) >gi\|4689436\|gb\|AAD27893.1\|AF143096_1 |
| | | (AF143096) peptidyl-prolyl cis-trans isomerase EPVH |
| | | [Homo sapiens] >gi\|5420453\|dbj\|BAA82320.1\| |
| | | (AB009690) parvulin [Homo sapiens] Length |
| 534 | 2024534 | 1E-100 >emb\|CAB43O54.1\| (AL049876) |
| | | disease resistance response protein |
| | | [Arabidopsis thaliana] Length = 184 |
| 535 | 2024535 | 2E-51 >emb\|CAA73155\| 10 (Y12575) |
| | | histone H2A.F/Z [Arabidopsis thaliana] |
| | | Length = 136 |
| 536 | 2024536 | SE-83 >gi\|3176668 (AC004393) |
| | | Similar to ribosomal protein L17 |
| | | gb\|X62724 from Hordeum vulgare. ESTs |
| | | gb\|Z34728, gb\|F19974, gb\|T75677 and |
| | | gb\|Z33937 come from this gene. |
| | | [Arabidopsis thaliana] Length = 175 |
| 537 | 2024537 | Tyr_Phospho_Site(443-450) |
| 538 | 2024538 | 2E-41 >emb\|CAA90663.1\| (Z50795) |
| | | weak similarity with yeast cat8 regulatory protein |
| | | (Swiss Prot accession number P39113); cDNA EST |
| | | EMBL:Z14554 comes from this gene; cDNA EST |
| | | EMBL:T02057 comes from this gene; cDNA EST |
| | | EMBL:D75504 comes from this gene... Length = 618 |
| 539 | 2024539 | Tyr_Phospho_Site(448-454) |
| 540 | 2024540 | 2E-26 >sp\|P72874\|IF3SYNY3 TRANSLATION |
| | | INITIATION FACTOR |
| | | IF-3 >gi\|1651964\|dbj\|BAA168901 (D90901) |
| | | initiation factor IF-3 [Synechocystis sp.] |
| | | Length = 177 |
| 541 | 2024541 | 1E-104 >emb\|CAA73792\| (Y13356) |
| | | glyoxysomal isocitrate lyase [Brassica |
| | | napus] Length = 576 |
| 542 | 2024542 | 9E-76 >gb\|AAD51109.1\|AF176040_1 |
| | | (AF176040) ubiquitin-conjugating enzyme |
| | | UBC2 [Mesembryanthemum crystallinum] Length 148 |
| 543 | 2024543 | Tyr_Phospho_Site(917-925) |
| 544 | 2024544 | Tyr_Phospho_Site(1401-1407) |
| 545 | 2024545 | Pkc_Phospho_Site(25-27) |
| 546 | 2024546 | 9E-75 >emb\|CAA76606\| (Y17053) |
| | | At-heat shock 70-3 protein, |
| | | [Arabidopsis thaliana] Length = 649 |
| 547 | 2024547 | 1E-107 >gi\|3287687 (AC003979) |
| | | Match to sucrose-proton symporter |
| | | (SUC2) gene gb\|X75382 from A. thaliana. |
| | | [Arabidopsis thaliana] Length = 512 |
| 548 | 2024548 | 3E-42 >gi\|3065814 (AF058714) |
| | | sodium-dicarboxylate cotransporter |
| | | SDCT1 [Rattus |
| | | norvegicus] >gi\|3168585\|dbj\|BAA28609\| |
| | | (AB001321) sodium-dependent dicarboxylate transporter |
| | | [Rattus norvegicusi Length = 587 |
| 549 | 2024549 | 3E-18 >sp\|O35075\|DCRA_MOUSE DOWN |
| | | SYNDROME CRITICAL REGION |
| | | PROTEIN A >gi\|2588993\|dbj\|BAA23270\| |
| | | (AB001990) Dcra [Mus musculus] Length = 297 |
| 550 | 2024550 | 4E-88 >gi\|166834 (M86720) ribulose |
| | | bisphosphate carboxylase/oxygenase activase |
| | | [Arabidopsis thaliana] >gi\|2642155 |
| | | (AC003000) Rubisco activase [Arabidopsis thaliana] |
| | | Length = 474 |
| 551 | 2024551 | 2E-72 >pir\|\|S71209 ubiquitin conjugating enzyme |
| | | E2 protein - Arabidopsis thaliana >gi\|992704 |
| | | (U33757) UBC7 [Arabidopsis thaliana] |
| | | Length = 166 |
| 552 | 2024552 | 2E-58 >emb\|CAA23033.1\| (AL035394) |
| | | major latex protein [Arabidopsis |
| | | thaliana] Length = 151 |
| 553 | 2024553 | Tyr_Phospho_Site(883-890) |
| 554 | 2024554 | 3E-36 >gi\|3033377 (AC004238) |
| | | berberine bridge enzyme [Arabidopsis |
| | | thaliana] Length = 540 |
| 555 | 2024555 | 3E-24 >emb\|CAA15173\| (AJ235273) |
| | | GLUTAREDOXIN-LIKE PROTEIN |
| | | GRLA (grxC2) [Rickettsia prowazekii] Length = 107 |
| 556 | 2024556 | 6E-53 >emb\|CAA23022.1\| (AL035394) |
| | | cellulase [Arabidopsis thaliana] |
| | | Length = 479 |
| 557 | 2024557 | 8E-54 >emb\|CAA16683\| (AL021684) |
| | | lysosomal Pro-X carboxypeptidase - |
| | | like protein [Arabidopsis thaliana] Length = 499 |
| 558 | 2024558 | Tyr_Phospho_Site(416-424) |
| 559 | 2024559 | Pkc_Phospho_Site(101-103) |
| 560 | 2024560 | Pkc_Phospho_Site(22-24) |
| 561 | 2024561 | 2E-21 >gi\|3834319 (AC005679) |
| | | Similar to gi\|2244754 heat shock transcription |
| | | factor HSF30 homolog from Arabidopsis thaliana |
| | | chromosome 4 contig gb\|Z97335. [Arabidopsis |
| | | thaliana] Length = 458 |
| 562 | 2024562 | 1E-50 >emb\|CAA22574.1\| (AL034567) |
| | | ubiquinol-cytochrome c reductase-like protein |
| | | [Arabidopsis thaliana] Length = 122 |
| 563 | 2024563 | 3E-87 >gi\|1732570 (U72153) beta- |
| | | glucosidase [Arabidopsis thaliana] |
| | | Length = 525 |
| 564 | 2024564 | Tyr_Phospho_Site(669-676) |
| 565 | 2024565 | Tyr_Phospho_Site(399-406) |
| 566 | 2024566 | Pkc_Phospho_Site(31-33) |
| 567 | 2024567 | Rgd(900-902) |
| 568 | 2024568 | 2E-58 >emb\|CAA06925\| (AJ006228) |
| | | Avr9 elicitor response protein |
| | | [Nicotiana tabacum] Length = 396 |
| 569 | 2024569 | Pkc_Phospho_Site(8-10) |
| 570 | 2024570 | 2E-74 >sp\|Q96558\|UGDH_SOYBN UDP- |
| | | GLUCOSE 6-DEHYDROGENASE (UDP- |
| | | GLC DEHYDROGENASE) (UDP-GLCDH) |
| | | (UDPGDH) >gi\|1518540 (U53418) UDP- |
| | | glucose dehydrogenase [Glycine max] |
| | | Length = 480 |
| 571 | 2024571 | 1E-64 >gb\|AAD15398\| (AC006223) |
| | | ribosomal protein S12 [Arabidopsis |
| | | thaliana] Length = 144 |
| 572 | 2024572 | 1E-45 >gi\|3142301 (AC002411) |
| | | Contains similarity to neural cell adhesion |
| | | molecule 2, large isoform precursor gb\|M76710 |
| | | from Xenopus laevis, and beta transducin from |
| | | S. cerevisiae gb\|Q05946. ESTs gb\|N65081 |
| | | gb\|Z30910, gb\|Z34190, gb\|Z34611, gb\|R30101, |
| | | gb\|H3630... Length = 838 |
| 573 | 2024573 | Tyr_Phospho_Site(639-647) |
| 574 | 2024574 | Pkc_Phospho_Site(184-186) |
| 575 | 2024575 | Zinc_Protease(1049-1058) |
| 576 | 2024576 | 3E-58 >emb\|CAA63482\| (X92888) |
| | | glycolate oxidase [Lycopersicon esculentum] |
| | | Length = 290 |
| 577 | 2024577 | Pkc_Phospho_Site(84-86) |
| 578 | 2024578 | Tyr_Phospho_Site(1378-1384) |
| 579 | 2024579 | 2E-39 >gi\|3980417 (AC004561) |
| | | pumilio-like protein [Arabidopsis |
| | | thaliana] Length = 964 |
| 580 | 2024580 | 5E-75 >gb\|AAC34215.1\| (AC004411) |
| | | anion exchange protein 3 [Arabidopsis thaliana] |
| | | Length = 344 |
| 581 | 2024581 | 2E-80 ) >gb\|AAC78255.1\|AAC78255 (AC002330) |
| | | bZIP-Iike DNA binding protein |
| | | [Arabidopsis thaliana] Length = 411 |
| 582 | 2024582 | 4E-47 >emb\|CAB16844.1\| (Z99708) serine |
| | | O-palmitoyltransferase like protein |
| | | [Arabidopsis thaliana] Length = 475 |
| 583 | 2024583 | 2E-18 >gb\|AAD20711\| (AC006300) |
| | | phosphate/phosphoenolpyruvate translocator |
| | | protein [Arabidopsis thaliana] Length = 347 |
| 584 | 2024584 | 3E-20 >gb\|AAD46141.1\|AF081022_1 |
| | | (AF081022) hypoxia-induced protein L31 |
| | | [Lycopersicon esculentum] Length = 78 |
| 585 | 2024585 | 3E-47 >gb\|AAD46410.1\|AF096260_1 |
| | | (AF096260) ER66 protein [Lycopersicon |
| | | esculentum] Length = 558 |
| 586 | 2024586 | Tyr_Phospho_Site(304-310) |
| 587 | 2024587 | Tyr_Phospho_Site(954-961) |
| 588 | 2024588 | SE-69 >emb\|CAA52772\| (X74756) |
| | | ATAF2 [Arabidopsis thaliana] Length = 214 |
| 589 | 2024589 | 2E-64 >sp\|P21653\|TIP1_TOBAC |
| | | TONOPLAST INTRINSIC PROTEIN, |
| | | ROOT-SPECIFIC RB7-5A |
| | | (RT-TIP) >gi\|82192\|pir\|\|JQ1011 |
| | | TobRB7-5A protein - common |
| | | tobacco >gi\|100371\|pir\|\|S13719 probable |
| | | membrane channel protein - common |
| | | tobacco >gi\|20011\|emb\|CAA38634\| (X54855) |
| | | possible membrane channel protein |
| | | [Nicotiana tabacum] Length = 250 |
| 590 | 2024590 | Tyr_Phospho_Site(11-19) |
| 591 | 2024591 | Tyr_Phospho_Site(842-849) |
| S92 | 2024592 | 1E-75 >gi\|3582341 (AC005496) |
| | | flavonol 3-o-glucosyltransferase |
| | | [Arabidopsis thaliana] Length = 474 |
| 593 | 2024593 | 5E-16 >gb\|AAC97956.1\| (AF103731) |
| | | glycolipid transfer protein [Homo |
| | | sapiens] Length = 391 |
| 594 | 2024594 | 1E-30 >gb\|AAD56411.1\|AF185269_1 |
| | | (AF185269) bHLH transcription factor |
| | | GBOF-1 [Tulipa gesneriana] Length = 321 |
| 595 | 2024595 | Pkc_Phospho_Site(48-50) |
| 596 | 2024596 | 1E-39 >gi\|1946362 (U93215) |
| | | photosystem II reaction center 6.1KD |
| | | protein [Arabidopsis thaliana] Length = 133 |
| 597 | 2024597 | Rgd(1271-1273) |
| 598 | 2024598 | 1E-1 01 >emb\|CAA72363\| (Y11650) |
| | | cyclic phosphodiesterase [Arabidopsis |
| | | thaliana] >gi\|2832621 \|emb\|CAA16750.1\| |
| | | (AL021711) cyclic phosphodiesterase |
| | | [Arabidopsis thaliana] Length = 181 |
| 599 | 2024599 | Tyr_Phospho_Site(1199-1207) |
| 600 | 2024600 | 3E-26 >gb\|AAC78298.1\| (AF054615) |
| | | cellulase [Fragaria x ananassa] Length = 561 |
| 601 | 2024601 | 7E-59 >ref\|NP_001016.1\|PRPS23\| ribosomal |
| | | protein S23 >gi\|730647\|sp\|P39028\|RS23_HUMAN |
| | | 40S RIBOSOMAL PROTEIN |
| | | S23 >gi\|543449\|pir\|\|541955 ribosomal protein |
| | | S23 - rat >gi\|631360\|pir\|\|S42105 |
| | | ribosomal protein S23, cytosolic - human >gi |
| 602 | 2024602 | 4E-60 >emb\|CAA18139\| (AL022141) |
| | | cytochrome P450 like protein (fragment) |
| | | [Arabidopsis thaliana] Length = 255 |
| 603 | 2024603 | 3E-67 ) >sp\|P48578\|P2A4_ARATH SERINE/ |
| | | THREONINE PROTEIN |
| | | PHOSPHATASE PP2A-4 CATALYTIC |
| | | SUBUNIT >gi\|2117984\|pir\|\|552660 |
| | | phosphoprotein phosphatase (EC 3.1.3.16) 2A isoform |
| | | 4 - Arabidopsis thaliana >gi\|473259 |
| | | (U08047) Ser/Thr protei |
| 604 | 2024604 | 8E-64 ) >gb\|AAD56997.1\|AC009465_11 |
| | | (AC009465) ribosomal protein s19 or |
| | | s24 [Arabidopsis thaliana] Length = 133 |
| 605 | 2024605 | 2E-67 >gb\|AAD40139.1\|AF149413_20 |
| | | (AF149413) similar to malate dehydrogenases; |
| | | Pfam PF00390, Score=1290.5.E=0, N=1 |
| | | [Arabidopsis thaliana] Length = 588 |
| 606 | 2024606 | 2E-16 >ref\|NP_005099.1\|PXYLB\| xylulokinase |
| | | (H. influenzae) homolog >gi\|3298502\|dbj\|BAA31527\| |
| | | (AB015046) xylulokinase [Homo sapiens] |
| | | Length = 527 |
| 607 | 2024607 | Tyr_Phospho_Site(111-118) |
| 608 | 2024608 | 3E-65 ) >dbj\|BAA82063.1\| (AB022325) |
| | | pClpP [Arabidopsis |
| | | thaliana] >gi\|5881719\|dbj\|BAA84410.1\| |
| | | (AP000423) ATP-dependent protease subunit |
| | | [Arabidopsis thaliana] Length = 196 |
| 609 | 2024609 | 2E-35 >emb\|CAA05875\| (AJ003119) |
| | | protein phosphatase 20 [Arabidopsis |
| | | thaliana] Length = 511 |
| 610 | 2024610 | Tyr_Phospho_Site(469-475) |
| 611 | 2024611 | 1E-1 17 >gi\|2827139 (AF027172) |
| | | cellulose synthase catalytic subunit [Arabidopsis |
| | | thaliana] >gi\|4049343\|emb\|CAA22568.1\| |
| | | (AL034567) cellulose synthase catalytic subunit (RSW1) |
| | | [Arabidopsis thaliana] Length = 1081 |
| 612 | 2024612 | 1E-86 >pir\|\|S61555 xyloglucan endo-transglycosylase |
| | | precursor-Arabidopsis |
| | | thaliana >gi\|944810\|dbj\|BAA09783\| |
| | | (D63508) endo-xyloglucan transferase [Arabidopsis |
| | | thaliana] >gi\|5730137\|emb\|CAB52471.1\| |
| | | (AL109796) xyloglucan endo-1,4-beta-D-glucanase |
| | | precursor [Arabidopsis thaliana] Length = 269 |
| 613 | 2024613 | 5E-22 >gi\|4164473 (AF061157) |
| | | negatively light-regulated protein |
| | | [Vernicia fordii] Length = 108 |
| 614 | 2024614 | 4E-63 >gi\|2462840 (AF000657) |
| | | cytochrome C [Arabidopsis thaliana] |
| | | Length = 114 |
| 615 | 2024615 | 1E-100 >pir\|\|S62783 UDPglucose |
| | | 4-epimerase (EC 5.1.3.2) - Arabidopsis |
| | | thaliana >gi\|1143392\|emb\|CAA90941\| |
| | | (Z54214) uridine diphosphate glucose epimerase |
| | | [Arabidopsis thaliana] Length = 351 |
| 616 | 2024616 | Pkc_Phospho_Site(5-7) |
| 617 | 2024617 | Tyr_Phospho_Site(852-859) |
| 618 | 2024618 | 1E-61 >gi\|3319355 (AF077407) |
| | | similar to chaperonin containing TCP-1 |
| | | complex gamma chain [Arabidopsis |
| | | thaliana] Length = 562 |
| 619 | 2024619 | 4E-45 >gb\|AAD18030 (AF118129) |
| | | Tsi1-interacting protein TSIP1 |
| | | [Nicotiana tabacum] Length 154 |
| 620 | 2024620 | 1E-105 >emb\|CAA69258\| (Y07961) |
| | | GOP-associated inhibitor [Arabidopsis |
| | | thaliana] Length = 445 |
| 621 | 2024621 | 5E-96 >gi\|2462758 (AC002292) |
| | | RNA-binding protein [Arabidopsis |
| | | thaliana] Length = 292 |
| 622 | 2024622 | 5E-99 >gb\|AAD14467\| (AC005275) |
| | | LRR receptor-linked protein kinase |
| | | [Arabidopsis thaliana] Length = 754 |
| 623 | 2024623 | 6E-40 >emb\|CAB10346.1\| (Z97339) |
| | | glutaredoxin [Arabidopsis thaliana] |
| | | Length = 102 |
| 624 | 2024624 | 4E-35 >gi\|2982283 (AF051226) |
| | | PREG-like protein [Picea mariana] |
| | | Length = 284 |
| 625 | 2024625 | 1E-125 >pir\|\|S58497 IAA11 |
| | | protein - Arabidopsis thaliana >gi\|972925 |
| | | (U18413) IAA11 [Arabidopsis thaliana] Length = 246 |
| 626 | 2024626 | 1E-74 >gb\|AAD31363.1\|AC006053_5 |
| | | (AC006053) proton-ATPase-like protein |
| | | [Arabidopsis thaliana] Length = 178 |
| 627 | 2024627 | 2E-36 >sp\|P04465\|CALM_TRYBB |
| | | CALMODULIN >gi\|71679\|pir\|\|MCUTG |
| | | calmodulin - Trypanosoma brucel |
| | | gambiense >gi\|539401\|pir\|\|A48111 |
| | | calmodulin C - Trypanosoma |
| | | brucei >gi\|10386\|emb\|CAA39861\| (X56511) |
| | | calmodulin [Trypanosoma brucei] Length = 149 |
| 628 | 2024628 | 3E-98 >emb\|CAB42911.1\| (AL049862) |
| | | protein 1 photosystem II oxygen- |
| | | evolving complex [Arabidopsis |
| | | thaliana] >gi\|5748502 \|emb\|CAB53092.1\| |
| | | (AJ145957) precursor of the 33 kDa subunit |
| | | of the oxygen evolving complex |
| | | [Arabidopsis thaliana] Length = 331 |
| 629 | 2024629 | Tyr_Phospho_Site(101-108) |
| 630 | 2024630 | 2E-34 >gb\|AAD25756.1\|AC007060_14 |
| | | (AC007060) Contains the PF\|00650 |
| | | CRAL/TRIO phosphatidyl-inositol-transfer |
| | | protein domain. ESTs gb\|T76582, gb\|N06574 |
| | | and gb\|Z25700 come from this gene. |
| | | [Arabidopsis thaliana] Length = 540 |
| 631 | 2024631 | 9E-82 >emb\|CAB38268\| (AL035602) |
| | | UDP rhamnose-anthocyanid in-3-glucoside |
| | | rhamnosyltransferase-like protein |
| | | [Arabidopsis thaliana] Length = 455 |
| 632 | 2024632 | 2E-91 >gb\|AAD5S461.1\|AC009322_1 |
| | | (AC009322) Heat-shock protein |
| | | [Arabidopsis thaliana] Length = 831 |
| 633 | 2024633 | 1E-56 >pir\|\|S51478 drought-induced |
| | | protein Di19 - Arabidopsis |
| | | thaliana >gi\|469110\|emb\|CAA55321\| |
| | | (X78584) Di19 [Arabidopsis thaliana] |
| | | Length = 206 |
| 634 | 2024634 | Pkc_Phospho_Site(50-52) |
| 635 | 2024635 | Tyr_Phospho_Site(1341-1349) |
| 636 | 2024636 | 1E-102 >sp\|Q05153\|SSRP_ARATH STRUCTURE- |
| | | SPECIFIC RECOGNITION |
| | | PROTEIN 1 HOMOLOG (HMG |
| | | PROTEIN) >gi\|217853\|dbj\|BAA02719\| |
| | | (D13491) high mobility group protein |
| | | [Arabidopsis thaliana] Length = 644 |
| 637 | 2024637 | 2E-50 >gi\|1922944 (AC000106) |
| | | Strong similarity to Picea histone H2A (gb\|X67819). |
| | | ESTs gb\|ATTS3874,gb\|T46627,gb\|T14194 |
| | | come from this gene. |
| | | [Arabidopsis thaliana] Length = 142 |
| 638 | 2024638 | 2E-61 >dbj\|BAA13947\| (D89341) |
| | | luminal binding protein [Arabidopsis |
| | | thaliana] Length = 669 |
| 639 | 2024639 | 2E-51 >emb\|CAA19574.1\| (AL023859) |
| | | SPBC19C7.06, prolyl-trna synthetase, Ien:71 6aa, |
| | | similar eg. to YHR020W YHI0_YEAST, |
| | | P38708, p rolyl-trna synthetase yhr02, (688aa), |
| | | fasta scores, opt:248 6, EO:0, (55.1% identity in |
| | | 682 aa overl... Length = 716 |
| 640 | 2024640 | 8E-19 >gi\|3953473 (AC002328) |
| | | F2202.18 [Arabidopsis |
| | | thaliana] >gi\|5734520\|emb\|CAB52748.1\| |
| | | (AJ245630) photosystem I subunit V precursor |
| | | [Arabidopsis thaliana] Length 160 |
| 641 | 2024641 | 1E-85 ) >sp\|P35132\|UBC9_ARATH UBIQUITIN- |
| | | CONJUGATING ENZYME E2-17 KD 9 |
| | | (UBIQUITIN-PROTEIN LIGASE 9) |
| | | (UBIQUITIN CARRIER PROTEIN 9) |
| | | (UBCAT4B) >gi\|421857\|pir\|\|S32674 |
| | | ubiquitin-protein ligase (EC 6.3.2.19) UBC9 - |
| | | Arabidopsis thalia |
| 642 | 2024642 | Pkc_Phospho_Site(10-12) |
| 643 | 2024643 | 3E-84 >emb\|CAA18217.1\| (AL022223) |
| | | fructose-bisphosphate aldolase-like |
| | | protein [Arabidopsis thaliana] Length = 358 |
| 644 | 2024644 | 4E-86 ) >dbj\|BAA34251\| (AB013887) |
| | | RAV2 [Arabidopsis thaliana] Length = 352 |
| 645 | 2024645 | 3E-68 >dbj\|BAA31512\| (AB010880) |
| | | chloroplast ribosomal protein L17 |
| | | [Nicotiana tabacum] Length = 205 |
| 646 | 2024646 | 1E-67 >dbj\|BAA08282\| (D45848) |
| | | calmodulin-related protein [Arabidopsis |
| | | thaliana] >gi\|3402707 (AC004261) |
| | | calmodulin-related protein [Arabidopsis |
| | | thaliana] Length = 324 |
| 647 | 2024647 | 6E-87 >sp\|P24704\|SODC_ARATH SUPER- |
| | | OXIDE DISMUTASE |
| | | [CU-ZN] >gi\|66372\|pir\|\|DSMUZ superoxide |
| | | dismutase (EC 1.15.1.1) (Cu-Zn) - Arabidopsis |
| | | thaliana >gi\|16250\|emb\|CAA43270\| (X60935) |
| | | superoxide dismutase [Arabidopsis |
| | | thaliana] Length = 152 |
| 648 | 2024648 | 7E-64 >sp\|Q42S89\|NLT1_ARATH NON- |
| | | SPECIFIC LIPID-TRANSFER |
| | | PROTEIN 1 PRECURSOR (LTP |
| | | 1) >gi\|177796 (M80567) non-specific lipid |
| | | transfer protein [Arabidopsis |
| | | thaliana] >gi\|3786018 (AC005499) |
| | | unknown protein |
| | | [Arabidopsis thaliana] Length = 118 |
| 649 | 2024649 | 8E-31 >gi\|3859560 (AF098668) |
| | | acyl-protein thioesterase [Homo |
| | | sapiens] >gi\|4581413\|emb\|CAB40158.1\| |
| | | (AL031295) dJ886K2.4 (acyl-protein thioesterase) |
| | | [Homo sapiens] Length = 231 |
| 650 | 2024650 | 4E-97 ) >sp\|P46309\|GSH1_ARATH GLU- |
| | | TAMATE-CYSTEINE LIGASE |
| | | PRECURSOR (GAMMA-GLUTAMYLCYSTEINE |
| | | SYNTHETASE) (GAMMA-ECS) |
| | | (GCS) >gi\|2129598\|pir\|\|S60128 glutamate- |
| | | cysteine ligase (EC 6.3.2.2) precursor, |
| | | chloroplast - Arabidopsis thali |
| 651 | 2024651 | Tyr_Phospho_Site(1134-1141) |
| 652 | 2024652 | 2E-76 >sp\|P42733\|R11B_ARATH 40S |
| | | RIBOSOMAL PROTEIN S11-BETA >gi\|166869 |
| | | (L07877) ribosomal protein S11 |
| | | [Arabidopsis thaliana] Length = 159 |
| 653 | 2024653 | 8E-89 ) >sp\|P29511\|TBA6_ARATH TUBULIN |
| | | ALPHA-6 CHAIN >gi\|282852\|pir\|\|JQ1597 |
| | | tubulin alpha-6 chain - Arabidopsis |
| | | thaliana >gi\|166920 (M84699) TUA6 [Arabidopsis |
| | | thaliana] >gi\|2244853\|emb\|CAB10275.1\| |
| | | (Z97337) tubulin alpha-6 chain (TUA6) |
| | | [Arabidopsis thaliana] Length = 450 |
| 654 | 2024654 | 2E-48 >gi\|2982283 (AF051226) |
| | | PREG-like protein [Picea mariana] |
| | | Length = 284 |
| 655 | 2024655 | 1E-180 ) >gb\|AAD34236.1\|AF083913_1 |
| | | (AF083913) annexin [Arabidopsis |
| | | thaliana] Length = 317 |
| 656 | 2024656 | 1E-108 >emb\|CAA07574.1\| (AJ007587) |
| | | monooxygenase [Arabidopsis |
| | | thaliana] Length = 397 |
| 657 | 2024657 | 4E-18 >gi\|1913901 (U90919) |
| | | zinc finger protein [Homo sapiens] |
| | | Length = 478 |
| 658 | 2024658 | 2E-35 >gb\|AAD46413.1\|AF096263_1 |
| | | (AF096263) ER33 protein [Lycopersicon |
| | | esculentum] Length = 140 |
| 659 | 2024659 | Pkc_Phospho_Site(26-28) |
| 660 | 2024660 | 6E-87 >sp\|P40229\|KC2C_ARATH CASEIN |
| | | KINASE II BETA'CHAIN |
| | | (CK II) >gi\|1076300\|pir\|\|S47968 |
| | | casein kinase II (EC 2.7.1.-) beta chain CKB2 - |
| | | Arabidopsis thaliana >gi\|467975 (U03984) |
| | | casein kinase II beta subunit CKB2 [Arabidopsis |
| | | thaliana] >gi\|2245l22\|emb\|CAB10544.1\| |
| | | (Z97343) casein kinase II beta chain CKB2 |
| | | [Arabidopsis thaliana] Length = 282 |
| 661 | 2024661 | Pkc_Phospho_Site(11-13) |
| 662 | 2024662 | Tyr_Phospho_Site(272-279) |
| 663 | 2024663 | 1E-16 >sp\|Q6262S\|MPL3_RAT MICRO- |
| | | TUBULE-ASSOCIATED PROTEINS |
| | | 1A/1B LIGHT CHAIN 3 (MAP1A/MAP1B |
| | | LC3) >gi\|1083715\|pir\|\|A53624 |
| | | microtubule-associated protein 1 light chain 3 - |
| | | rat >gi\|455109 (U05784) light chain |
| | | 3 subunit of microtubule-associated proteins 1A and 1B |
| | | [Rattus norvegicus] Length = 142 |
| 664 | 2024664 | Pkc_Phospho_Site(122-124) |
| 665 | 2024665 | 2E-61 >emb\|CAA16688\| (AL021684) |
| | | receptor protein kinase - like protein |
| | | [Arabidopsis thaliana] Length = 1003 |
| 666 | 2024666 | 4E-42 >gi\|2275217 (AC002337) |
| | | chloroplast protein CP12 isolog |
| | | [Arabidopsis thaliana] Length = 124 |
| 667 | 2024667 | Rgd(1000-1002) |
| 668 | 2024668 | Tyr_Phospho_Site(295-301) |
| 669 | 2024669 | Pkc_Phospho_Site(19-21) |
| 670 | 2024670 | 1E-102 ) >emb\|CAA18217.1\| (AL022223) |
| | | fructose-bisphosphate aldolase-like protein |
| | | [Arabidopsis thaliana] Length = 358 |
| 671 | 2024671 | 5E-15 >gb\|AAD17407\| (AC006248) |
| | | salt-inducible protein [Arabidopsis |
| | | thaliana] Length = 627 |
| 672 | 2024672 | 9E-11 >gb\|AAD09328.1\| (AF019082) |
| | | virulent strain associated lipoprotein |
| | | [Borrelia burgdorferi] Length = 460 |
| 673 | 2024673 | 2E-79 >gi\|3927837 (AC005727) |
| | | core protein [Arabidopsis thaliana] |
| | | Length = 148 |
| 674 | 2024674 | Pkc_Phospho_Site(14-16) |
| 675 | 2024675 | 5E-87 >gi\|3128228 (AC004077) |
| | | ribosomal protein L18A [Arabidopsis |
| | | thaliana] >gi\|3337376 (AC004481) |
| | | ribosomal protein Li 8A [Arabidopsis thaliana] |
| | | Length = 178 |
| 676 | 2024676 | 1E-64 >gi\|2102691 (U64817) |
| | | fructokinase [Lycopersicon esculentum] |
| | | Length = 347 |
| 677 | 2024677 | 2E-90 >sp\|P10797\|RBS3_ARATH RIBULOSE |
| | | BISPHOSPHATE CARBOXYLASE SMALL |
| | | CHAIN 2B PRECURSOR (RUBISCO SMALL |
| | | SUBUNIT 2B) >gi\|68061\|pir\|\|RKMUB2 |
| | | ribulose-bisphosphate carboxylase (EC 4.1.1.39) |
| | | small chain B2 precursor - Arabidopsis |
| | | thaliana >gi\|16194\|emb\|CAA32701\| |
| | | (X14564) ribulose bisphosphate carboxylase |
| | | [Arabidopsis thaliana] Length = 181 |
| 678 | 2024678 | 1E-54 >gi\|3355475 (AC004218) |
| | | ribosomal protein L23a [Arabidopsis |
| | | thaliana] Length = 154 |
| 679 | 2024679 | Wd_Repeats(907-921) |
| 680 | 2024680 | 4E-31 >gb\|AAD15381\| (AC006223) |
| | | myosin II heavy chain [Arabidopsis |
| | | thaliana] Length = 1269 |
| 681 | 2024681 | Tyr_Phospho_Site(71-77) |
| 682 | 2024682 | 1E-128 >sp\|Q07098\|P2A1_ARATH SERINE/ |
| | | THREONINE PROTEIN |
| | | PHOSPHATASE PP2A-1 CATALYTIC |
| | | SUBUNIT >gi\|418779\|pir\|\|S31162 |
| | | phosphoprotein phosphatase (EC 3.1.3.16) 2A-alpha |
| | | catalytic chain (clone EP14a) - Arabidopsis |
| | | thaliana >gi\|166823 (M96733) protein |
| | | phosphatase [Arabidopsis |
| | | thaliana] >gi\|5091535\|gb\|AAD39564.1\|AC00706_4 |
| | | (AC007067) T10O24.4 [Arabidopsis thaliana] |
| | | Length = 306 |
| 683 | 2024683 | 1E-102 >gi\|2880054 (AC002340) |
| | | cytochrome P450 [Arabidopsis |
| | | thaliana] Length = 497 |
| 684 | 2024684 | 1E-55 >gi\|2213643 (U57338) |
| | | glossy1 homolog [Oryza sativa] |
| | | Length = 555 |
| 685 | 2024685 | 1E-103 >emb\|CAB45848.1\| (AL080254) |
| | | reticuline oxidase-like protein |
| | | [Arabidopsis thaliana] Length = 532 |
| 686 | 2024686 | 2E-74 ) >gb\|AAD32844.1\|AC007658_3 |
| | | (AC007658) thioredoxin-like protein |
| | | [Arabidopsis thaliana] Length = 130 |
| 687 | 2024687 | Pkc_Phospho_Site(223-225) |
| 688 | 2024688 | 3E-83 >emb\|CAA98170\| (Z73942) |
| | | RAB7C [Lotus japonicus] Length = 206 |
| 689 | 2024689 | 3'1E-100 >gi\|3122271\|sp\|O04294\|IMA2_ARATH IM- |
| | | PORTIN ALPHA-2 SUBUNIT |
| | | (KARYOPHERIN ALPHA-2 SUBUNIT) |
| | | (KAP ALPHA) >gi\|2154717\|emb\|CAA70703\| |
| | | (Y09511) Kap alpha protein [Arabidopsis thaliana] |
| | | Length = 531 |
| 690 | 2024690 | 2E-61 >gb\|AAD03449.1\| (AF118223) |
| | | contains similarity to Methanobacterium |
| | | thermoautotrophicum transcriptional regulator |
| | | (GB:AE000850) |
| | | [Arabidopsis thaliana] Length = 281 |
| 691 | 2024691 | 1E-124 >gi\|2829893 (AC002311) |
| | | phosphoglucomutase [Arabidopsis |
| | | thaliana] Length = 582 |
| 692 | 2024692 | 7E-83 >gi\|4206789 (AF112864) |
| | | syntaxin-related protein At-SYR1 |
| | | [Arabidopsis thaliana] Length = 346 |
| 693 | 2024693 | Tyr_Phospho_Site(1227-1235) |
| 694 | 2024694 | 8E-77 >emb\|CAB43837.1\| (AL078464) |
| | | proteinase-like protein [Arabidopsis |
| | | thaliana] Length = 816 |
| 695 | 2024695 | 7E-13 >emb\|CAA96548\| (Z72439) |
| | | major allergen Cor a 1 [Corylus |
| | | avellana] Length = 160 |
| 696 | 2024696 | Tyr_Phospho_Site(290-298) |
| 697 | 2024697 | 2E-48 >gb\|AAD18156\| (AC006260) |
| | | RNA-binding protein [Arabidopsis |
| | | thaliana] Length = 305 |
| 698 | 2024698 | 8E-36 >gi\|3850579 (AC005278) |
| | | Strong similarity to gb\|D14550 extracellular |
| | | dermal glycoprotein (EDGP) precursor from Daucus carota. |
| | | ESTs gb\|H37281, gb\|T44167, gb\|T21813, |
| | | gb\|N38437, gb\|Z26470, gb\|R65072, gb\|N76373, |
| | | gb\|F15470, gb\|Z35182, gb\|H76373, gb\|Z34678 |
| | | an... Length = 433 |
| 699 | 2024699 | 5E-45 >emb\|CAA69025\| (Y07745) |
| | | histone H2B like protein [Arabidopsis |
| | | thaliana] Length = 145 |
| 700 | 2024700 | Tyr_Phospho_Site(419-426) |
| 701 | 2024701 | Tyr_Phospho_Site(50-58) |
| 702 | 2024702 | 4E-63 >gb\|AAD27763.1\|AF077030_1 |
| | | (AF077030) hypothetical 43.2 kDa protein [Homo |
| | | sapiens] >gi\|4929577\|gb\|AAD34049.1\|AF151812_1 |
| | | (AF151812) CGI-54 |
| | | protein [Homo sapiens] Length 383 |
| 703 | 2024703 | 7E-64 >pir\|\|S71257 major latex protein type 1 - |
| | | Arabidopsis thaliana >gi\|1107493\|emb\|CAA63026\| |
| | | (X91960) major latex protein typel [Arabidopsis |
| | | thaliana] Length = 155 |
| 704 | 2024704 | 5E-14 >gi\|2252854 (AF013294) |
| | | similar to auxin-induced protein |
| | | [Arabidopsis thaliana] Length = 122 |
| 705 | 2024705 | 1E-126 >sp\|P11035\|N1A2_ARATH NITRATE |
| | | REDUCTASE 2 (NR2) >gi\|66202\|pir\|\|RDMUNH |
| | | nitrate reductase (NADH) (EC 1.6.6.1) 2 - Arabidopsis |
| | | thaliana >gi\|166782 (J03240) nitrate |
| | | reductase (EC 1.6.6.1) [Arabidopsis thaliana] |
| | | Length = 917 |
| 706 | 2024706 | 1E-79 >gb\|AAD18140\| (AC006260) 60S |
| | | ribosomal protein L12 |
| | | [Arabidopsis thaliana] Length = 166 |
| 707 | 2024707 | Tyr_Phospho_Site(1118-1125) |
| 708 | 2024708 | 4E-16 >gb\|AAD31580.1\|AC006922_12 |
| | | (AC006922) farnesylated protein |
| | | [Arabidopsis thaliana] Length = 329 |
| 709 | 2024709 | 1E-74 >sp\|P34788\|RS18_ARATH 40S |
| | | RIBOSOMAL PROTEIN |
| | | S18 >gi\|480908\|pir\|\|S37496 ribosomal |
| | | protein S18.A - Arabidopsis |
| | | thaliana >gi\|405613\|emb\|CAA80684\| |
| | | (Z23165) ribosomal protein S18A [Arabidopsis |
| | | thaliana] >gi\|434343\|emb\|CAA82273\| |
| | | (Z28701) S18 ribosomal protein [Arabidopsis |
| | | thaliana] >gi\|434345\|emb\|CAA82274\| |
| | | (Z28702) S18 ribosomal protein [Arabidopsis |
| | | thaliana] >gi\|434906\|emb\|CAA82275\| |
| | | (Z28962) S18 ribosomal protein [Arabidopsis |
| | | thaliana] >gi\|2505871\|emb\|CAA72909\| |
| | | (Y12227) ribosomal protein S18A [Arabidopsis |
| | | thaliana] >gi\|3287678 (AC003979) Match to |
| | | ribosomal S18 gene mRNA gb\|Z28701, DNA gb\|Z23165 |
| | | from A. thaliana. ESTs gb\|T21121, gb\|Z17755, |
| | | gb\|R64776 and gb\|R30430 come from this gene. |
| | | [Arabidopsis thaliana] >gi\|4538910\|emb\|CAB39647.1\| |
| | | (AL049482) S18.A ribosomal protein [Arabidopsis thaliana] |
| | | Length = 152 |
| 710 | 2024710 | Pkc_Phospho_Site(17-19) |
| 711 | 2024711 | 8E-83 >sp\|P24226\|HISX_BRAOC HISTIDINOL |
| | | DEHYDROGENASE, CHLOROPLAST PRECURSOR |
| | | (HDH) >gi\|99844\|pir\|\|A39358 histidinol |
| | | dehydrogenase (EC 1.1.1.23) precursor, chloroplast - |
| | | cabbage >gi\|167142 (M60466) histidinol dehydrogenase |
| | | [Brassica oleracea] Length = 469 |
| 712 | 2024712 | Tyr_Phospho_Site(42-50) |
| 713 | 2024713 | 4E-44 >emb\|CAB51195.1\| (AL096859) |
| | | glucuronosyl transferase-like protein |
| | | [Arabidopsis thaliana] Length = 385 |
| 714 | 2024714 | 1E-78 >emb\|CAA18477.1\| (AL022347) |
| | | serine/threonine kinase-like protein |
| | | [Arabidopsis thaliana] Length = 643 |
| 715 | 2024715 | 7E-38 >gb\|AAD17415\| (AC006248) |
| | | serine/threonine kinase [Arabidopsis |
| | | thaliana] Length = 365 |
| 716 | 2024716 | 9E-62 >emb\|CAB41340.1\| (AL049711) |
| | | dihydrolipoamide S-acetyltransferase precursor |
| | | [Arabidopsis thaliana] Length = 637 |
| 717 | 2024717 | Pkc_Phospho_Site(45-47) |
| 718 | 2024718 | Tyr_Phospho_Site(626-632) |
| 719 | 2024719 | Tyr_Phospho_Site(275-282) |
| 720 | 2024720 | 8E-38 >gb\|AAD51282.1\|AF159587_1 |
| | | (AF159587) far-red impaired response |
| | | protein [Arabidopsis thaliana] Length = 827 |
| 721 | 2024721 | Tyr_Phospho_Site(100-108) |
| 722 | 2024722 | Tyr_Phospho_Site(573-579) |
| 723 | 2024723 | 3E-79 >sp\|P25855\|GCSH_ARATH GLYCINE |
| | | CLEAVAGE SYSTEM H |
| | | PROTEIN PRECURSOR >gi\|166725 (M82921) |
| | | H-Protein precursor [Arabidopsis |
| | | thaliana] >gi\|861215 (U27144) |
| | | glycine decarboxylase complex H-protein precursor |
| | | [Arabidopsis thaliana] >gi\|3608151 |
| | | (AC005314) glycine decarboxylase complex H- |
| | | protein [Arabidopsis thali- |
| | | ana] >gi\|445119\|prf\|\|1908425A |
| | | Gly decarboxylase:SUBUNITH protein |
| | | [Arabidopsis thaliana] Length = 165 |
| 724 | 2024724 | Pkc_Phospho_Site(12-14) |
| 725 | 2024725 | Tyr_Phospho_Site(7-15) |
| 726 | 2024726 | 1E-37 >gi\|2160133 (AC000375) |
| | | Strong similarity to Arabidopsis |
| | | gb\|X91953,F19K23.3,F19K23.15. ESTs |
| | | gb\|T21984,gb\|ATTSQ219,gb\|ATTS0207,gb\|T21984 |
| | | come from this gene. |
| | | [Arabidopsis thaliana] Length = 150 |
| 727 | 2024727 | 1E-11 >sp\|Q00808\|HET1_PODAN VEGE- |
| | | TATIBLE INCOMPATIBILITY |
| | | PROTEIN HET-E-1 >gi\|607003 (L28125) |
| | | beta transducin-Iike protein [Podospora |
| | | anserina] Length = 1356 |
| 728 | 2024728 | Tyr_Phospho_Site(1 233-1240) |
| 729 | 2024729 | Tyr_Phospho_Site(646-654) |
| 730 | 2024730 | 3E-68 >sp\|P36212\|R12C_ARATH 50S |
| | | RIBOSOMAL PROTEIN L12-C, |
| | | CHLOROPLAST PRECURSOR |
| | | (CL12-C) >gi\|541897\|pir\|\|C53394 ribosomal |
| | | protein L12.C, chloroplast - Arabidopsis |
| | | thaliana >gi\|468773\|emb\|CAA48183\| |
| | | (X68046) ribosomal protein L12 |
| | | [Arabidopsis thaliana] Length = 187 |
| 731 | 2024731 | 9E-40 >emb\|CAA16752.1\| (AL021711) |
| | | protein kinase-like protein |
| | | [Arabidopsis thaliana] Length 421 |
| 732 | 2024732 | Pkc_Phospho_Site(67-69) |
| 733 | 2024733 | 1E-67 >sp\|P36428\|SYA_ARATH ALANYL- |
| | | TRNA SYNTHETASE, |
| | | MITOCHONDRIAL PRECURSOR |
| | | (ALANINE-TRNA LIGASE) |
| | | (ALARS) >gi\|1673365\|emb\|CAA80380\| |
| | | (Z22673) mitochondrial tRNA-Ala synthetase |
| | | [Arabidopsis thaliana] Length = 1003 |
| 734 | 2024734 | Tyr_Phospho_Site(124-130) |
| 735 | 2024735 | Pkc_Phospho_Site(23-25) |
| 736 | 2024736 | Tyr_Phospho_Site(194-201) |
| 737 | 2024737 | 2E-57 >sp\|P51419\|RL27_ARATH 60S |
| | | RIBOSOMAL PROTEIN |
| | | L27 >gi\|2244857\|emb\|CAB10279.1\| |
| | | (Z97337) ribosomal protein [Arabidopsis thaliana] |
| | | Length = 135 |
| 738 | 2024738 | Tyr_Phospho_Site(958-965) |
| 739 | 2024739 | 6E-11 >gi\|3341687 (AC003672) |
| | | ras protein [Arabidopsis thaliana] |
| | | Length = 93 |
| 740 | 2024740 | 0 >prf\|\|1804333D Gln synthetase |
| | | [Arabidopsis thaliana] Length = 430 |
| 741 | 2024741 | 5E-84 >dbj\|BAA85109.1\| (AB030732) |
| | | Cys2/His2-type zinc finger protein 3 |
| | | [Arabidopsis thaliana] Length = 193 |
| 742 | 2024742 | 1E-12 >emb\|CAB43438.1\| (AL050300) |
| | | protein [Arabidopsis thaliana] |
| | | Length = 541 |
| 743 | 2024743 | 2E-36 >gb\|AAD31078.1\|AC007357_27 |
| | | (AC007357) Contains PF100097 Zinc |
| | | finger (C3HC4) ring finger motif. [Arabidopsis |
| | | thaliana] Length = 260 |
| 744 | 2024744 | Rgd(902-904) |
| 745 | 2024745 | Tyr_Phospho_Site(472-478) |
| 746 | 2024746 | 6E-52 >gb\|AAF00626.1\|AC009540_3 |
| | | (AC009540) GAR1 protein [Arabidopsis |
| | | thaliana] >gi\|6223652\|gb\|AAF05866.1\|AC011698_17 |
| | | (AC011698) unknown |
| | | protein [Arabidopsis thaliana] Length 219 |
| 747 | 2024747 | Tyr_Phospho_Site(27-34) |
| 748 | 2024748 | 3E-75 >sp\|P08927\|RUBB_PEA RUBISCO |
| | | SUBUNIT BINDING-PROTEIN |
| | | BETA SUBUNIT PRECURSOR (60 KD |
| | | CHAPERONIN BETA SUBUNIT) (CPN-60 |
| | | BETA) >gi\|806808 (U21139) chaperonin precursor |
| | | [Pisum sativum] Length = 595 |
| 749 | 2024749 | 9E-72 >pir\|\|D36571 ubiquitin |
| | | 81-aa extension protein 2 - Arabidopsis |
| | | thaliana >gi\|166936 (J05540) ubiquitin |
| | | extension protein (UBQ6) [Arabidopsis |
| | | thaliana] >gi\|3522953\|gb\|AAC34235.1\| |
| | | (AC004411) ubiquitin extension protein |
| | | (UBQ6) [Arabidopsis thaliana] Length = 157 |
| 750 | 2024750 | 1E-129 >sp\|Q40082\|XYLA_HORVU XYLOSE |
| | | ISOMERASE >gi\|2130052\|pir\|\|S65467 xylose |
| | | isomerase (EC 5.3.1.5) - |
| | | barley >gi\|1296809\|emb\|CAA64545\| (X95257) |
| | | xylose isomerase [Hordeum vulgare] |
| | | Length = 479 |
| 751 | 2024751 | 9E-57 >sp\|P27202\|PSBR_ARATH PHOTO- |
| | | SYSTEM 1110 KD POLYPEPTIDE |
| | | PRECURSOR >gi\|72714\|pir\|\|F2MU10 photosystem |
| | | II 10K protein precursor - Arabidopsis |
| | | thaliana >gi\|16447\|emb\|CAA39441\| |
| | | (X55970) photosystem II 10 kDa polypeptide [Arabidopsis |
| | | thaliana] >gi\|3152571 (AC002986) Match |
| | | to photosystem II 10kDa polypeptide gb\|X55970. |
| | | ESTs gb\|Z17693, gb\|N37616, gb\|T41858, |
| | | gb\|T88021, gb\|R37531, gb\|T04679, gb\|N37520, |
| | | gb\|N64965, gb\|Z17592 and gb\|N65338, |
| | | gb\|N37466 and gb\|T45400 come from this gene. |
| | | [Arabidopsis ... Length = 140 |
| 752 | 2024752 | 2E-11 >gb\|AAD48957.1\|AF149414_6 |
| | | (AF149414) contains similarity to Pfam |
| | | family PF00646 (F-box domain); score=11/3, E=0.23, |
| | | N=1 [Arabidopsis thaliana] |
| | | Length = 378 |
| 753 | 2024753 | 1E-120 >gi\|3927825 (AC005727) |
| | | dTDP-glucose 4-6-dehydratase |
| | | [Arabidopsis thaliana] Length = 343 |
| 754 | 2024754 | 3E-43 >gi\|2708747 (AC003952) |
| | | glycine-rich, zinc-finger DNA-binding |
| | | protein [Arabidopsis thaliana] Length = 299 |
| 755 | 2024755 | 1E-50 >pdb\|\|E2C\|A Chain A, |
| | | E2-C, An Ubiquitin Conjugating Enzyme |
| | | Required For The Destruction Of Mitotic |
| | | Cyclins >gi\|3660188\|pdb\|\|E2C\|B Chain |
| | | B, E2-C, An Ubiquitin Conjugating Enzyme Required For |
| | | The Destruction Of Mitotic |
| | | Cyclins >gi\|3660189\|pdb\|\|E2C\|C Chain C, |
| | | E2-C, |
| 756 | 2024756 | Pkc_Phospho_Site(27-29) |
| 757 | 2024757 | 3E-20 >sp\|P47198\|RL22_RAT 60S |
| | | RIBOSOMAL PROTEIN |
| | | L22 >gi\|1083790\|pir\|\|S52084 ribosomal |
| | | protein L22 - rat >gi\|710295\|emb\|CAA55204\| |
| | | (X78444) ribosomal protein L22 [Rattus |
| | | norvegicus] >gi\|1093952\|prf\|\|2105193A |
| | | ribosomal protein |
| 758 | 2024758 | Tyr_Phospho_Site(999-1005) |
| 759 | 2024759 | 7E-91 >sp\|Q43291\|RL2I_ARATH 60S |
| | | RIBOSOMAL PROTEIN |
| | | L21 >gi\|2160162 (AC000132) Similar to ribosomal |
| | | protein L21 (gb\|L38826). ESTs |
| | | gb\|AA395597,gb\|ATTS5197 come from this gene. |
| | | [Arabidopsis thaliana] >gi\|3482935 |
| | | (AC003970) ribosomal protein L21 |
| | | [Arabidopsis thaliana] Length = 164 |
| 760 | 2024760 | 2E-89 >gi\|2443883 (AC002294) |
| | | Similar to RPS-2 disease resistance |
| | | protein [Arabidopsis thaliana] Length = 967 |
| 761 | 2024761 | 2E-18 >gb\|AAD31580.1\|AC006922_12 |
| | | (AC006922) farnesylated protein |
| | | [Arabidopsis thaliana] Length = 329 |
| 762 | 2024762 | Tyr_Phospho_Site(166-173) |
| 763 | 2024763 | 1E-1 1 >emb\|CAA85467.1\| (Z37093) |
| | | weak similarity with gamma-interferon |
| | | inducible protein IP-30 (Swiss Prot accession number |
| | | P13284) [Caenorhabditis elegans] Length = 264 |
| 764 | 2024764 | Pkc_Phospho_Site(67-69) |
| 765 | 2024765 | 4E-60 >gb\|AAD50027.1\|AC00765_22 |
| | | (AC007651) Similar to leucine-rich receptor-like protein |
| | | kinase [Arabidopsis thaliana] Length = 1133 |
| 766 | 2024766 | 1E-17 >gi\|4206767 (AF104330) |
| | | glycine-rich protein 3 short isoform |
| | | [Arabidopsis thaliana] Length = 116 |
| 767 | 2024767 | Pkc_Phospho_Site(7-9) |
| 768 | 2024768 | 3E-74 >dbj\|BAA36335\| (AB015141) |
| | | AHP1 [Arabidopsis |
| | | thaliana] >gi\|4156245\|dbj\|BAA37112\| |
| | | (AB012570) ATHP3 [Arabidopsis thaliana] |
| | | Length = 154 |
| 769 | 2024769 | 7E-61 >gi\|3894193 (AC005662) |
| | | strictosidine synthase [Arabidopsis |
| | | thaliana] Length = 395 |
| 770 | 2024770 | 4E-94 ) >sp\|P46283\|S17P_ARATH SEDO- |
| | | HEPTULOSE-1,7-BISPHOSPHATASE, |
| | | CHLOROPLAST PRECURSOR (SEDOHEPTULOSE- |
| | | BISPHOSPHATASE) (SBPASE) |
| | | (SED(1,7)P2ASE) >gi\|1076403\|pir\|S51838 |
| | | sedoheptulose-1,7-biphosphatase - Arabidopsis |
| | | thaliana >gi\|786466\|bbs\|159034 |
| | | (S74719) sedoheptulose-1,7-bisphosphatase, SBPase |
| | | {EC 3.1.3.37}[Arabidopsis thaliana, |
| | | C24, Peptide Chloroplast, 393 aa] |
| | | [Arabidopsis thaliana] Length = 393 |
| 771 | 2024771 | Tyr_Phospho_Site(325-333) |
| 772 | 2024772 | 6E-67 >sp\|Q07511\|FDH_SOLTU MITO- |
| | | CHONDRIAL FORMATE |
| | | DEHYDROGENASE PRECURSOR |
| | | (NAD-DEPENDENT FORMATE |
| | | DEHYDROGENASE) |
| | | (FDH) >gi\|542089\|pir\|\|JQ2272 formate |
| | | dehydrogenase (EC 1.2.1.2) precursor, mitochondrial - |
| | | potato >gi\|297798\|emb\|CAA79702\| (Z21493) |
| | | mitochondrial formate dehydrogenase precursor |
| | | [Solanum tuberosum] Length = 379 |
| 773 | 2024773 | 3E-41 >emb\|CAA66408\| (X97829) |
| | | product similar to ccr protein, Citrus |
| | | paradisi; PIR: S52663 [Arabidopsis |
| | | thaliana] >gi\|1550735\|emb\|CAA66824\| |
| | | (X98130) unknown [Arabidopsis thaliana] |
| | | Length = 141 |
| 774 | 2024774 | Tyr_Phospho_Site(1099-1106) |
| 775 | 2024775 | Tyr_Phospho_Site(853-859) |
| 776 | 2024776 | Tyr_Phospho_Site(962-969) |
| 777 | 2024777 | 2E-66 >gb\|AAD22351.1\|AC006592_8 |
| | | (AC006592) mitochondrial uncoupling |
| | | protein [Arabidopsis thaliana] Length = 313 |
| 778 | 2024778 | 1E-104 >gi\|2829923 (AC002291) |
| | | Similar to uridylyl transferases |
| | | [Arabidopsis thaliana] Length = 453 |
| 779 | 2024779 | 4E-68 >gi\|2218152 (AF005279) |
| | | type lila membrane protein cp-wap13 |
| | | [Vigna unguiculata] Length = 346 |
| 780 | 2024780 | Rgd(490-492) |
| 781 | 2024781 | Pkc_Phospho_Site(57-59) |
| 782 | 2024782 | 5E-20 >emb\|CAA19701.1\| (AL024486) |
| | | lectin like protein [Arabidopsis |
| | | thaliana] Length = 246 |
| 783 | 2024783 | 5E-56 >sp\|P55871\|IF2B_MALDO EUKAR- |
| | | YOTIC TRANSLATION INITIATION |
| | | FACTOR 2 BETA SUBUNIT |
| | | (EIF-2-BETA) >gi\|1732361 (U80269) translation |
| | | initiation factor 2 beta [Malus domestica] |
| | | Length = 307 |
| 784 | 2024784 | Pkc_Phospho_Site(23-25) |
| 785 | 2024785 | 9E-32 >sp\|P46600\|HAT1_ARATH HOMEO- |
| | | BOX-LEUCINE ZIPPER PROTEIN |
| | | HAT1 (HD-ZIP PROTEIN 1) >gi\|549883 |
| | | (U09332) homeobox protein [Arabidopsis |
| | | thaliana] >gi\|549884 (U09333) |
| | | homeobox protein [Arabidopsis |
| | | thaliana] >gi\|2245105\|emb\|CAB10S27.1\| |
| | | (Z97343) homeobox-leucine zipper protein HAT1 |
| | | (hd-zip protein 1) [Arabidopsis thaliana] |
| | | Length = 282 |
| 786 | 2024786 | 1E-44 >dbj\|BAA819l0.1\| (AB011262) |
| | | nuclear transport factor 2 (NTF2) |
| | | [Oryza sativa] Length = 122 |
| 787 | 2024787 | 1E-10 >emb\|CAA18838.1\| (AL023094) |
| | | bZIP transcription factor ATB2 |
| | | [Arabidopsis thaliana] Length 159 |
| 788 | 2024788 | 1E-1 24 >gi\|3980393 (AC004561) |
| | | glutathione 5-transferase [Arabidopsis |
| | | thaliana] Length = 227 |
| 789 | 2024789 | 1E-116 >emb\|CAA11414\| (AJ223496) |
| | | phosphoenolpyrovate carboxylase |
| | | [Brassica juncea] Length = 964 |
| 790 | 2024790 | 1E-110 >emb\|CAB52677.1\| (AJ245907) |
| | | photosystem I subunit II precursor |
| | | [Arabidopsis thaliana] Length = 204 |
| 791 | 2024791 | Tyr_Phospho_Site(1255-1262) |
| 792 | 2024792 | Pkc_Phospho_Site(166-168) |
| 793 | 2024793 | 6E-65 >dbj\|BAA19529\| (AB002560) |
| | | CUC2 [Arabidopsis thaliana] Length = 375 |
| 794 | 2024794 | Pkc_Phospho_Site(40-42) |
| 795 | 2024795 | 6E-63 >emb\|CAA66909\| (X98255) |
| | | transcriptionally stimulated by |
| | | gibberellins; expressed in meristematic region, and |
| | | style [Arabidopsis thaliana] Length = 106 |
| 796 | 2024796 | 1E-129 >emb\|CAB39626.1\| (AL049481) |
| | | oxidoreductase [Arabidopsis |
| | | thaliana] Length = 389 |
| 797 | 2024797 | 1E-101 >sp\|Q38937\|RACS_ARATH RAC- |
| | | LIKE GTP BINDING PROTEIN |
| | | ARAC5 >gi\|1293668 (U52350) GTP-binding protein |
| | | [Arabidopsis thaliana] Length = 196 |
| 798 | 2024798 | Tyr_Phospho_Site(505-512) |
| 799 | 2024799 | 2E-61 >gi\|2252850 10 (AF013294) |
| | | contains region of similarity to DNA |
| | | binding protein [Arabidopsis thaliana] |
| | | Length = 575 |
| 800 | 2024800 | 1E-85 >sp\|P21238\|RUBA_ARATH RUBISCO |
| | | SUBUNIT BINDING-PROTEIN |
| | | ALPHA SUBUNIT PRECURSOR (60 |
| | | KD CHAPERONIN ALPHA SUBUNIT) |
| | | (CPN-60 ALPHA) >gi\|2129561\|pir\|\|S71235 |
| | | chaperonin-60 alpha chain - Arabidopsis |
| | | thaliana >gi\|1223910 (U49357) |
| | | chaperonin-60 alpha subunit [Arabidopsis |
| | | thaliana] >gi\|4510416\|gb\|AAD21502.1\| |
| | | (AC006929) rubisco binding protein alpha subunit |
| | | [Arabidopsis thaliana] Length = 586 |
| 801 | 2024801 | Tyr_Phospho_Site(662-669) |
| 802 | 2024802 | Pkc_Phospho_Site(45-47) |
| 803 | 2024803 | 3E-15 >dbj\|BAA77204.1\| (AB026262) |
| | | ring finger protein [Cicer arietinum] |
| | | Length = 131 |
| 804 | 2024804 | Tyr_Phospho_Site(517-523) |
| 805 | 2024805 | 4E-17 >emb\|CAA04730\| (AJ001401) |
| | | HpnA protein [Zymomonas mobilis] |
| | | Length = 337 |
| 806 | 2024806 | 1E-23 >ref\|NP_002803.1\|PPSMD8\| |
| | | proteasome (prosome, macropain) 26S subunit, non-ATPase, |
| | | 8 >gi\|1346766\|sp\|P48556\|PSD8 HUMAN 26S |
| | | PROTEASOME REGULATORY SUBUN IT S14 |
| | | (P31) >gi\|136274\|pir\|\|S56108 |
| | | multicatalytic endopeptidase complex (EC 3.4.99.46) |
| | | regulatory chain 31 - |
| | | human >gi\|1037164\|dbj\|BAA07237\| |
| | | (D38047) 26S proteasome subunit p31 [Homo |
| | | sapiens] >gi\|3702282 (AC005789) PP31_HUMAN |
| | | [Homo sapiens] Length = 257 |
| 807 | 2024807 | Tyr_Phospho_Site(162-169) |
| 808 | 2024808 | 1E-50 >gb\|AAD153451\| (AC004044) |
| | | small nuclear riboprotein Sm-D1 |
| | | [Arabidopsis thaliana] Length = 116 |
| 809 | 2024809 | Pkc_Phospho_Site(61-63) |
| 810 | 2024810 | Rgd(360-362) |
| 811 | 2024811 | Tyr_Phospho_Site(528-535) |
| 812 | 2024812 | 5E-20 >emb\|CAA77232\| (Y18620) |
| | | DsPTP1 protein [Arabidopsis thaliana] |
| | | Length = 198 |
| 813 | 2024813 | 8E-55 ) >emb\|CAA11524.1\| (AJ223634) |
| | | transcription factor IIA small subunit [Arabidopsis |
| | | thaliana] >gi\|5051786 \|emb\|CAB45079.1\| |
| | | (AL078637) transcription factor IIA small subunit |
| | | [Arabidopsis thaliana] Length = 106 |
| 814 | 2024814 | 2E-37 >gi\|2651314 (AC002336) |
| | | ribosomal protein S26 [Arabidopsis |
| | | thaliana] Length = 133 |
| 815 | 2024815 | 5E-76 >emb\|CAB36783.1\| (AL035525) |
| | | aminopeptidase-like protein [Arabidopsis thaliana] |
| | | Length = 873 |
| 816 | 2024816 | 1E-75 >sp\|P49203\|RS13_ARATH 40S |
| | | RIBOSOMAL PROTEIN S13 Length = 150 |
| 817 | 2024817 | 1E-111 >sp\|Q01908\|ATP1_ARATH ATP |
| | | SYNTHASE GAMMA CHAIN 1, CHLOROPLAST |
| | | PRECURSOR >gi\|81635\|pir\|\|B39732 H+-transporting |
| | | ATP synthase (EC 3.6.1.34) gamma-I chain precursor, |
| | | chloroplast - Arabidopsis thaliana >gi\|166632 |
| | | (M61741) ATP synthase gamma-subunit [Arabidopsis |
| | | thaliana] >gi\|5732056\|gb\|AAD48955.1\|AF149414_4 |
| | | (AF149414) Arabidopsis thaliana APCI-ATP synthase |
| | | gamma chain 1 (GB:M61741); contains similarity to |
| | | Pfam PF00231 -ATP synthase; score=658.6, |
| | | E=3.1e-194n n+1 Length = 373 |
| 818 | 2024818 | Tyr_Phospho_Site(58-64) |
| 819 | 2024819 | 2E-26 >gi\|3236253 (AC004684) |
| | | receptor-like protein kinase [Arabidopsis |
| | | thaliana] Length = 675 |
| 820 | 2024820 | Rgd(217-219) |
| 821 | 2024821 | 2E-85 ) >sp\|P35131\|UBC8_ARATH UBIQ- |
| | | UITIN-CONJUGATING ENZYME E2- |
| | | 17 KD 8 (UBIQUITIN-PROTEIN LIGASE 8) |
| | | (UBIQUITIN CARRIER PROTEIN 8) |
| | | (UBCAT4A) >gi\|398699\|emb\|CAA78713\| |
| | | (Z14989) ubiquitin conjugating enzyme |
| | | homolog [Arabidosis thaliana] Length = 148 |
| 822 | 2024822 | Tyr_Phospho_Site(473-480) |
| 823 | 2024823 | Tyr_Phospho_Site(227-235) |
| 824 | 2024824 | Pkc_Phospho_Site(54-56) |
| 825 | 2024825 | Serpin(547-557) |
| 826 | 2024826 | 1E-105 >emb\|CAA16700.1\| (AL021687) |
| | | kinase-like protein [Arabidopsis |
| | | thaliana] Length 290 |
| 827 | 2024827 | 2E-57 >gi\|3859606 (AF104919) |
| | | contains similarity to cysteine proteases |
| | | (Pfam: PF00112, E=1.3e-79, N=1) |
| | | [Arabidopsis thaliana] Length = 359 |
| 828 | 2024828 | 3E-70 >gi\|3980378 (AC004561) |
| | | RNA binding protein [Arabidopsis |
| | | thaliana] Length = 483 |
| 829 | 2024829 | 7E-60 >gi\|3687249 (AC005169) |
| | | copia-like transposable element |
| | | [Arabidopsis thaliana] Length = 122 |
| 830 | 2024830 | 4E-37 >emb\|CAB36546.1\| (AL035440) |
| | | DNA binding protein [Arabidopsis |
| | | thaliana] Length = 427 |
| 831 | 2024831 | 0 >gbjAAD41432.1\|AC007727_21 (AC007727) |
| | | Contains similarity to gb\|AJ000644 SPOP |
| | | (speckle-type POZ protein) from Homo sapiens and |
| | | contains a PF\|00651 BTB/POZ domain. ESTs |
| | | gb\|T75841, gb\|R89974, gb\|R30221, |
| | | gb\|N96386, gb\|T76457, gb\|A1100013 and gb... |
| | | Length = 326 |
| 832 | 2024832 | 1E-67 >gb\|AAD20138\| (AC006282) |
| | | 60S ribosomal protein L24 [Arabidopsis |
| | | thaliana] >gi\|4581159\|gb\|AAD24643.1\|AC006919_21 |
| | | (AC006919) 60S ribosomal protein L24 |
| | | [Arabidopsis thaliana] Length = 177 |
| 833 | 2024833 | 2E-80 >sp\|Q42340\|RS16_ARATH 40S |
| | | RIBOSOMAL PROTEIN S16 Length = 146 |
| 834 | 2024834 | 1E-126 ) >sp\|Q06402\|1A12_ARATH 1- |
| | | AMINOCYCLOPROPANE-2-CARBOXYLATE |
| | | SYNTHASE 2 (ACC SYNTHASE 2) |
| | | (S-ADENOSYL-L-METHIONINE |
| | | METHYLTHIOADENOSINE-LYASE |
| | | 2) >gi\|476924\|pir\|\|A47199 1- |
| | | aminocyclopropane-1-carboxylate synthase |
| | | (EC 4.4.1.14) - |
| 835 | 2024835 | 7E-25 >gi\|2264378 (AC002354) |
| | | bZIP-Iike transcription factor |
| | | [Arabidopsis thaliana] Length = 669 |
| 836 | 2024836 | 6E-49 >gi\|3603473 (AF090698) |
| | | elicitor-responsive gene-3 [Oryza sativa] |
| | | Length = 144 |
| 837 | 2024837 | Tyr_Phospho_Site(467-473) |
| 838 | 2024838 | 2E-98 >gb\|AAD33097.1\|AF082525_1 |
| | | (AF082525) homoserine kinase |
| | | [Arabidopsis thaliana] Length = 370 |
| 839 | 2024839 | Tyr_Phospho_Site(494-501) |
| 840 | 2024840 | 4E-57 >gi\|1063415 (L40948) |
| | | K+ channel protein [Arabidopsis thaliana] |
| | | Length = 328 |
| 841 | 2024841 | 8E-66 >gi\|3176663 (AC004393) |
| | | Contains similarity to S-receptor kinase |
| | | 8 precursor gb\|D38563 from Brassica rapa. |
| | | ESTs gb\|T88253 and gb\|AA394649 come from this gene. |
| | | [Arabidopsis thaliana] Length = 389 |
| 842 | 2024842 | 3E-37 >emb\|CAB37534\| (AL035538) |
| | | MADS-box protein AGL17-like |
| | | protein [Arabidopsis thaliana] Length 228 |
| 843 | 2024843 | Tyr_Phospho_Site(179-185) |
| 844 | 2024844 | 1E-85 >gi\|2583124 (AC002387) |
| | | 5-enolpyruvylshikimate-3-phosphate synthase |
| | | (EPSP) [Arabidopsis thaliana] Length = 520 |
| 845 | 2024845 | 3E-51 >gi\|3355468 (AC004218) |
| | | ribosomal protein L35 [Arabidopsis |
| | | thaliana] Length = 123 |
| 846 | 2024846 | 1E-64 ) >emb\|CAB51209.1\| (AL096860) |
| | | 40S RIBOSOMAL PROTEIN S20 |
| | | homolog [Arabidopsis thaliana] Length = 122 |
| 847 | 2024847 | 3E-72 >gi\|4093155 (AF088281) |
| | | phytochrome-associated protein I |
| | | [Arabidopsis thaliana] Length = 267 |
| 848 | 2024848 | Tyr_Phospho_Site(621-627) |
| 849 | 2024849 | 4E-86 >emb\|CAB10353.1\| (Z97339) |
| | | hypothetical protein [Arabidopsis |
| | | thaliana] >gi\|3426058\|emb\|CAA07072.1\| |
| | | (AJ007585) IB1P8-4 protein [Arabidopsis |
| | | thaliana] Length = 171 |
| 850 | 2024850 | 1E-25 >sp\|Q06548\|APKA_ARATH PROTEIN |
| | | KINASE APK1A >gi\|282877\|pir\|\|S28615 |
| | | protein kinase, tyrosine/serine/threonine-specific (EC |
| | | 2.7.1 .-) - Arabidopsis |
| | | thaliana >gi\|217829\|dbj\|BAA02092\| |
| | | (D12522) protein tyrosine-serine-threonine |
| 851 | 2024851 | 7E-23 >sp\|P55610\|Y4PA_RHISN TRAN- |
| | | SCRIPTIONAL REGULATORY PROTEIN |
| | | Y4PA >gi\|2182569 (AE000089) Y4pA |
| | | [Rhizobium sp. NGR234] Length = 609 |
| 852 | 2024852 | 7E-51 >emb\|CAB41143.1 (AL049658) |
| | | peptide transporter [Arabidopsis |
| | | thaliana] Length = 450 |
| 853 | 2024853 | 2E-33 >gi\|2984225 (AE000766) |
| | | enolase-phosphatase E-1 [Aquifex |
| | | aeolicus] Length = 223 |
| 854 | 2024854 | 4E-77 >gi\|2191149 (AF007269) |
| | | Similar to protein kinase [Arabidopsis |
| | | thaliana] Length = 450 |
| 855 | 2024855 | 3E-71 ) >pir\|\|S58123 thioredoxin - |
| | | Arabidopsis thaliana >gi\|992964\|emb\|CAA84612\| |
| | | (Z35475) thioredoxin [Arabidopsis thaliana] |
| | | Length = 133 |
| 856 | 2024856 | Tyr_Phospho_Site 565-572 |
| 857 | 2024857 | Rgd(833-835) |
| 858 | 2024858 | 3E-83 ) >gb\|AAD41076.1\|AF141202_1 |
| | | (AF141202) EIN2 [Arabidopsis |
| | | thaliana] >gi\|5231115\|gb\|AAD41077.1\|AF141203_1 |
| | | (AF141203) EIN2 [Arabidopsis |
| | | thaliana] Length = 1294 |
| 859 | 2024859 | Tyr_Phospho_Site(57-64) |
| 860 | 2024860 | Tyr_Phospho_Site(598-604) |
| 861 | 2024861 | 3E-15 >gi\|3176673 (AC003671) |
| | | Similar to serine/threonine kinase |
| | | gb\|Y12531 from Brassica oleracea. |
| | | [Arabidopsis thaliana] Length = 321 |
| 862 | 2024862 | 5'1E-31 >gi\|5903082\|gb\|AAD55640.1\|AC008017_13 |
| | | (AC008017) Similar to downy mildew resistance protein |
| | | RPP5 [Arabidopsis thaliana] Length = 176 |
| 863 | 2024863 | Tyr_Phospho_Site(1029-1036) |
| 864 | 2024864 | 3E-29 >gb\|AAD14532\| (AC006200) |
| | | membrane transporter [Arabidopsis |
| | | thaliana] Length = 725 |
| 865 | 2024865 | Pkc PhosphoSite(36-38) |
| 866 | 2024866 | Tyr PhosphoSite(177-185) |
| 867 | 2024867 | 9E-89 >sp\|P50318\|PGKH_ARATH PHOS- |
| | | PHOGLYCERATE KINASE, |
| | | CHLOROPLAST >gi\|2129669\|pir\|\|S71368 |
| | | phosphoglycerate kinase - Arabidopsis |
| | | thaliana (fragment) >gi\|1022805\|gb\|AAB60303.1\| |
| | | (U37701) phosphoglycerate |
| | | kinase [Arabidopsis thaliana] Length = 399 |
| 868 | 2024868 | Tyr_Phospho_Site(1181-1187) |
| 869 | 2024869 | 5'Rgd(763-765) |
| 870 | 2024870 | 5E-83 >gi\|2459417 (AC002332) |
| | | pre-mRNA splicing factor PRP19 |
| | | [Arabidopsis thaliana] Length = 540 |
| 871 | 2024871 | Tyr_Phospho_Site(312-320) |
| 872 | 2024872 | Pkc_Phospho_Site(26-28) |
| 873 | 2024873 | 2E-92 >sp\|P29510\|TBA2_ARATH TUBULIN |
| | | ALPHA-2/ALPHA-4 CHAIN >gi\|320183\|pir\|\|JQ1594 |
| | | tubulin alpha chain - Arabidopsis thaliana >gi\|166914 |
| | | (M84696) apha-2 tubulin [Arabidopsis |
| | | thaliana] >gi\|166916 (M84697) alpha-4 |
| | | tubulin [Arabidopsis thaliana] Length = 450 |
| 874 | 2024874 | Tyr_Phospho_Site(1025-1032) |
| 875 | 2024875 | Rgd(354-356) |
| 876 | 2024876 | Tyr_Phospho_Site(239-247) |
| 877 | 2024877 | 4E-13 >sp\|O14069\|YEA4_SCHPO PROBABLE |
| | | 60s RIBOSOMAL PROTEIN |
| | | C2E11.04 >gi\|3395568\|emb\|CAA20151\| |
| | | (AL031181) 60s ribosomal protein L28 |
| | | [Schizosaccharomyces |
| | | pombe] >gi\|4106660\|emb\|CAA22600\| |
| | | (AL035064) 60s ribosomal protein 128 |
| | | [Schizosacoharomyces pombe] Length = 134 |
| 878 | 2024878 | 3E-74 >emb\|CAA18853.1\| (AL023094) |
| | | amidophosphoribosyltransferase 2 |
| | | precursor (Arabidopsis thaliana] Length = 561 |
| 879 | 2024879 | 1E-109 >sp\|P45432\|FUS6_ARATH FUSCA |
| | | PROTEIN FUS6 >gi\|432446 (L26498) |
| | | FUS6 [Arabidopsis thaliana] Length = 441 |
| 880 | 2024880 | Pkc_Phospho_Site(52-54) |
| 881 | 2024881 | 3E-59 >gi\|2262176 (AC002329) |
| | | RING zinc-finger protein [Arabidopsis |
| | | thaliana] >gi\|3790573 (AF078824) |
| | | RING-H2 finger protein RHA3a [Arabidopsis |
| | | thaliana] >gi\|4914367\|gb\|AAD32903.1\|AC007584_1 |
| | | (AC007584) zinc finger |
| | | protein [Arabidopsis thaliana] Length = |
| 882 | 2024882 | 3E-48 >gi\|473878 (U08315) |
| | | calnexin homolog [Arabidopsis thaliana] |
| | | Length = 528 |
| 883 | 2024883 | 7E-16 >dbj\|BAA81662.2\| (AB029060) |
| | | F1F0-ATPase inhibitor protein [Oryza |
| | | sativa] Length = 123 |
| 884 | 2024884 | 3E-36 >gb\|AAD34430.1\|AF084446_1 |
| | | (AF084446) calmodulin mutant SYNCAM36 |
| | | [synthetic construct] Length = 149 |
| 885 | 2024885 | Tyr_Phospho_Site(4-11) |
| 886 | 2024886 | 1E-59 >gi\|3157937 (AC002131) |
| | | Identical to aspartic proteinase cDNA |
| | | gb\|U51036 from A. thaliana. ESTs gb\|N96313, |
| | | gb\|T21893, gb\|R30158, gb\|T21482, gb\|T43650, |
| | | gb\|R64749, gb\|R65157, gb\|T88269, gb\|T44552, |
| | | gb\|T22542, gb\|T76533, gb\|T44350, gb\|Z34591, |
| | | gb\|AA728734, gb... Length = 506 |
| 887 | 2024887 | 3E-58 >sp\|Q39411\|RL26_BRARA 60S |
| | | RIBOSOMAL PROTEIN |
| | | L26 >gi\|2160300\|dbj\|BAA18941\| (078495) |
| | | ribosomal protein [Brassica rapa] |
| | | Length = 146 |
| 888 | 2024888 | 9E-73 >sp\|P43297\|RD21_ARATH CYSTEINE |
| | | PROTEINASE RD21A |
| | | PRECURSOR >gi\|541857\|pir\|\|JN0719 |
| | | drought-inducible cysteine proteinase (EC |
| | | 3.4.22.-) RD21A precursor - Arabidopsis |
| | | thaliana >gi\|435619\|dbj\|BAA02374\| |
| | | (D13043) thiol protease [Arabidopsis thaliana] |
| | | Length = 462 |
| 889 | 2024889 | 3'Rgd(764-766) |
| 890 | 2024890 | Tyr_Phospho_Site(750-757) |
| 891 | 2024891 | 6E-39 >emb\|CAA63008\| (X91915) |
| | | LEA 0113 homologue type1 |
| | | [Arabidopsis thaliana] Length = 158 |
| 892 | 2024892 | 1E-72 >gi\|3413705 (AC004747) |
| | | glycine dehydrogenase [Arabidopsis |
| | | thaliana] Length = 1044 |
| 893 | 2024893 | Tyr_Phospho_Site(738-745) |
| 894 | 2024894 | Tyr_Phospho_Site(223-229) |
| 895 | 2024895 | 1E-53 >gb\|AAD27909.1\|AC007213_7 |
| | | (AC007213) receptor protein kinase |
| | | [Arabidopsis thaliana] Length = 851 |
| 896 | 2024896 | 8E-65 >gi\|3687245 (AC005169) |
| | | ribosomal protein [Arabidopsis thaliana] |
| | | Length = 129 |
| 897 | 2024897 | Pkc_Phospho_Site(19-21) |
| 898 | 2024898 | Pkc_PhosphoSite(2-4) |
| 899 | 2024899 | Tyr_Phospho_Site(299-305) |
| 900 | 2024900 | Tyr_Phospho_Site(629-636) |
| 901 | 2024901 | 1E-15 >gb\|AAD37511.1\|AF139098_1 |
| | | (AF139098) zinc finger protein [Arabidopsis |
| | | thaliana] Length = 186 |
| 902 | 2024902 | Tyr_Phospho_Site(194-201) |
| 903 | 2024903 | 4E-65 >emb\|CAB36774.1\| (AL035524) |
| | | senescence-associated protein-like |
| | | [Arabidopsis thaliana] Length 263 |
| 904 | 2024904 | Tyr_Phospho_Site(442-449) |
| 905 | 2024905 | Somatotropin_2(1615-1632) |
| 906 | 2024906 | 1E-99 >sp\|Q42569\|C901_ARATH CYTOCHROME |
| | | P450 90A1 >gi\|1076315\|pir\|\|S55379 |
| | | cytochrome P450 - Arabidopsis |
| | | thaliana >gi\|853719\|emb\|CAA60793\| |
| | | (X87367) CYP90 protein [Arabidopsis |
| | | thaliana] >gi\|871988\|emb\|CAA60794\| |
| | | (X87368) CYP9O protein [Arabidopsis thaliana] |
| | | Length = 472 |
| 907 | 2024907 | 1E-45 >gi\|2829899 (AC002311) |
| | | similar to ripening-induced protein, |
| | | gp\|AJ001449\|2465015 and major#latex protein, |
| | | gp\|X91961\|1107495 [Arabidopsis |
| | | thaliana] Length = 160 |
| 908 | 2024908 | 1E-119 >gi\|1895084 (U89897) |
| | | golgi associated protein se-wap41 [Zea |
| | | mays] Length = 364 |
| 909 | 2024909 | 9E-90 >sp\|P15459\|2SS3_ARATH 2S |
| | | SEED STORAGE PROTEIN 3 |
| | | PRECURSOR (25 ALBUMIN STORAGE |
| | | PROTEIN) >gi\|68855\|pir\|\|NWMU3 2S |
| | | albumin 3 precursor-Arabidopsis |
| | | thaliana >gi\|166616 (M22033) albumin 2S |
| | | subunit 3 precursor [Arabidopsis |
| | | thaliana] >gi\|395201 \|emb\|CAA80868\| |
| | | (Z24744) 2S albumin isoform 3 [Arabidopsis |
| | | thaliana] >gi\|4490712\|emb\|CAB38846.1\| |
| | | AL035680 NWMU3-2S albumin 3 recursor |
| | | [Arabidosis thaliana] Length = 164 |
| 910 | 2024910 | 1E-109 >gb\|AAD20398\| (AC007019) |
| | | ribonucleoside-diphosphate |
| | | reductase large subunit [Arabidopsis thaliana] |
| | | Length = 816 |
| 911 | 2024911 | Pkc_Phospho_Site(7-9) |
| 912 | 2024912 | 4E-31 >sp\|P41153\|HSF8_LYCPE HEAT |
| | | SHOCK FACTOR PROTEIN HSF8 |
| | | (HEAT SHOCK TRANSCRIPTION FACTOR 8) |
| | | (HSTF 8) (HEAT STRESS TRANSCRIPTION |
| | | FACTOR) >gi\|100264 \|pir\|\|S25481 |
| | | heat shock transcription factor 8 - |
| | | Peruvian tomato >gi\|19492\|em |
| 913 | 2024913 | 2E-82 >gi\|3176726 (AC002392) |
| | | serine proteinase [Arabidopsis thaliana] |
| | | Length = 815 |
| 914 | 2024914 | Tyr_Phospho_Site(235-243) |
| 915 | 2024915 | 2E-66 >sp\|P46602\|HAT3_ARATH HOMEO- |
| | | BOX-LEUCINE ZIPPER PROTEIN |
| | | thaliana] >gi\|549890 (U09339) |
| | | homeobox protein [Arabidopsis thaliana] |
| | | Length = 315 |
| 916 | 2024916 | 1E-119 ) >gb\|AAD40885.1\|AF091713_1 |
| | | (AF091713) cellulose synthase catalytic |
| | | subunit [Arabidopsis thaliana] Length = 1026 |
| 917 | 2024917 | 2E-30 >sp\|Q24595\|XPC_DROME DNA- |
| | | REPAIR PROTEIN COMPLEMENTING |
| | | XP-C CELLS HOMOLOG (XERODERMA |
| | | PIGMENTOSUM GROUP C |
| | | COMPLEMENTING PROTEIN HOMOLOG) |
| | | (XPCDM) >gi\|630881 \|pir\|\|S42402 |
| | | xeroderma pigmentosum group C complementing |
| | | factor - fruit fly (Drosophila |
| | | melanogaster) >gi\|434008\|emb\|CA |
| 918 | 2024918 | 9E-11 >sp\|P53582\|AMP1_HUMAN METH- |
| | | IONINEAMINOPEPTIDASE 1 |
| | | (METAP 1) (PEPTIDASE M 1) |
| | | (KIAA0094) >gi\|577315\|dbj\|BAA07679\| |
| | | (D42084) KIAA0094 gene product is related to |
| | | S.cerevisiae methionine aminopeptidase. |
| | | [Homo sapiens] |
| 919 | 2024919 | 3E-90 >gi\|2317912 (U89959) |
| | | cathepsin B-like cysteine proteinase |
| | | [Arabidopsis thaliana] Length = 357 |
| 920 | 2024920 | 5E-53 >emb\|CAA64636\| (X95343) |
| | | hypersensitivity-related gene [Nicotiana |
| | | tabacum] Length = 460 |
| 921 | 2024921 | 4E-79 >gb\|AAD50034.1\|AC007651_29 |
| | | (AC007651) Very similar to SRG1 |
| | | [Arabidopsis thaliana] Length = 346 |
| 922 | 2024922 | 1E-119 >pir\|\|S51480 drought-induced protein Dr4 - |
| | | Arabidopsis thaliana >gi\|469114\|emb\|CAA55323\| |
| | | (X78586) Dr4 [Arabidopsis thaliana], |
| | | trypsin inhibitor Length = 209 |
| 923 | 2024923 | Pkc_PhosphoSite(189-191) |
| 924 | 2024924 | 3E-71 >ref\|NP_006692.1\|PD1M1\| |
| | | similar to S. pombe dim1+ >gi\|2565275 |
| | | (AF023611) Dimip homolog [Homo sapiens] |
| | | Length = 142 |
| 925 | 2024925 | 1E-60 >gi\|1707011 (U78721) |
| | | auxin-repressed protein isolog [Arabidopsis |
| | | thaliana] Length = 108 |
| 926 | 2024926 | 2E-49 >gi\|2829923 (AC002291) |
| | | Similar to uridylyl transferases |
| | | [Arabidopsis thaliana] Length = 453 |
| 927 | 2024927 | Pkc_Phospho_Site(33-35) |
| 928 | 2024928 | 7E-74 >pir\|\|S57951 beta- |
| | | fructofuranosidase (EC 3.2.1.26) - Arabidopsis |
| | | thaliana (fragment) >gi\|899153\|emb\|CAA61624\| |
| | | (X89454) beta-fructofuranosidase |
| | | [Arabidopsis thaliana] Length = 562 |
| 929 | 2024929 | 8E-36 >gi\|3228664 (AF069986) |
| | | nitrilase and fragile histidine triad fusion |
| | | protein NitFhit [Caenorhabditis elegans] |
| | | Length = 440 |
| 930 | 2024930 | 4E-58 >gi\|2246621 (AF004393) |
| | | salt-stress induced tonoplast intrinsic |
| | | protein [Arabidopsis thaliana] Length = 273 |
| 931 | 2024931 | Tyr_Phospho_Site(315-322) |
| 932 | 2024932 | Tyr_Phospho_Site(784-791) |
| 933 | 2024933 | 6E-69 >emb\|CAA18734.1\| (AL022604) |
| | | cysteine proteinase-like protein |
| | | (Arabidopsis thaliana] Length = 355 |
| 934 | 2024934 | 1E-80 >sp\|PS3780\|METC_ARATH CYS- |
| | | TATHIONINE BETA-LYASE |
| | | PRECURSOR (CBL) (BETA- |
| | | CYSTATHIONASE) (CYSTEINE |
| | | LYASE) >gi\|2129567\|pir\|\|S61429 |
| | | cystathionine beta-lyase (EC 4.4.1.8) - Arabidopsis |
| | | thaliana >gi\|704397 (L40511) cystathionine |
| | | beta-lyase [Arabidopsis thaliana] |
| | | Length = 464 |
| 935 | 2024935 | Pkc_Phospho_Site(28-30) |
| 936 | 2024936 | Tyr_Phospho_Site(8-15) |
| 937 | 2024937 | 4E-88 >gi\|2642430 (AC002391) |
| | | AP2 domain containing protein |
| | | [Arabidopsis thaliana] Length = 176 |
| 938 | 2024938 | 1E-108 >emb\|CAB10321.1\| (Z97338) |
| | | UFD1 like protein [Arabidopsis |
| | | thaliana] Length = 778 |
| 939 | 2024939 | Tyr_Phospho_Site(545-553) |
| 940 | 2024940 | 1E-77 >emb\|CAA55358\| (X78703) |
| | | catechol O-methyltransferase [Vanilla |
| | | planifolia] Length = 363 |
| 941 | 2024941 | 1E-108 >gi\|3236251 (AC004684) |
| | | phosphoribosylaminoimidazole |
| | | carboxylase [Arabidopsis thaliana] Length = 645 |
| 942 | 2024942 | Tyr_Phospho_Site(779-787) |
| 943 | 2024943 | Pkc_Phospho_Site(62-64) |
| 944 | 2024944 | 2E-94 >sp\|P42770\|GSHC_ARATH GLU- |
| | | TATHIONE REDUCTASE, |
| | | CHLOROPLAST PRECURSOR (GR) |
| | | (GRASE) >gi\|451198\|dbj\|BAA03137\| |
| | | (D14049) glutathione reductase precursor [Arabidopsis |
| | | thaliana] >gi\|1944448\|dbj\|BAA19653\| |
| | | (D89620) glutathione reductase precursor |
| | | [Arabidopsis thaliana] >gi\|740576\|prf\|\|2005376A |
| | | glutathione reductase |
| | | [Arabidopsis thaliana] Length = 565 |
| 945 | 2024945 | 9E-56 >sp\|P02300\|H3_PEA HISTONE |
| | | H3 >gi\|81849\|pir\|\|S04520 histone H3 (clone pH3c-1) - |
| | | alfalfa >gi\|82609\|pir\|\|A26014 histone H3 - |
| | | wheat >gi\|19607\|emb\|CAA31964\| (X13673) |
| | | histone H3 (AA 1-136) [Medicago |
| | | sativa] >gi\|19609\|emb\|CAA319651\| |
| | | (X13674) histone H3 (AA 1-136) [Medicago |
| | | sativa] >gi\|21797\|emb\|CAA25451\| |
| | | (X00937) H3 histone [Triticum aestivum] >gi\|488565 |
| | | (U09459) histone H3.1 [Medicago |
| | | sativa] >gi\|2565419 (AF026803) histone H3 |
| | | [Onobrychis viclifolia] Length = 136 |
| 946 | 2024946 | 1E-23 >sp\|P72749\|TYPA_SYNY3 GTP- |
| | | BINDING PROTEIN TYPA/BIPA |
| | | HOMOLOG >gi\|1651837\|dbj\|BAA16764\| |
| | | (D90900) elongation factor EF-G |
| | | [Synechocystis sp.] Length = 597 |
| 947 | 2024947 | Tyr_Phospho_Site(1486-1494) |
| 948 | 2024948 | Tyr_Phospho_Site(31-38) |
| 949 | 2024949 | 2E-62 >emb\|CAB37514\| (AL035540) |
| | | farnesylated protein (ATFP6) |
| | | [Arabidopsis thaliana] Length = 153 |
| 950 | 2024950 | 7E-53 >emb\|CAA17529.1\| (AL021960) |
| | | UV-damaged DNA-binding protein- |
| | | like [Arabidopsis thalianall Length = 1102 |
| 951 | 2024951 | Pkc_Phospho_Site(65-67) |
| 952 | 2024952 | Tyr_Phospho_Site(655-662) |
| 953 | 2024953 | Tyr_Phospho_Site(498-505) |
| 954 | 2024954 | 8E-35 >gb\|AAD32652.1\|AF139188_1 |
| | | (AF139188) HCF106 [Arabidopsis thaliana] |
| | | Length = 260 |
| 955 | 2024955 | 6E-93 ) >pir\|\|S65046 1,4-alpha- |
| | | glucan branching enzyme (EC 2.4.1.18) |
| | | isoform SBE2.2 precursor - Arabidopsis thaliana |
| | | (fragment) >gi\|726490 (U22428) |
| | | starch branching enzyme class II (Arabidopsis thaliana] |
| | | Length = 800 |
| 956 | 2024956 | Tyr_Phospho_Site(549-556) |
| 957 | 2024957 | 9E-85 ) >gb\|AAC17823.1\| (AC004401) |
| | | casein kinase II catalytic subunit |
| | | [Arabidopsis thaliana] Length = 432 |
| 958 | 2024958 | 3E-46 >gi\|4185505 (AF101038) |
| | | nonspecific lipid-transfer protein |
| | | precursor [Brassica napus] Length = 112 |
| 959 | 2024959 | 2E-84 >sp\|Q96286\|DCAM_ARATH S- |
| | | ADENOSYLMETHIONINE |
| | | DECARBOXYLASE PROENZYME (ADOMETOC) |
| | | (SAMDC) >gi\|1531763\|emb\|CAA69073\| |
| | | (Y07765) S-adenosylmethionine decarboxylase |
| | | [Arabidopsis thaliana] Length = 366 |
| 960 | 2024960 | 1E-111 >emb\|CAB45311.1\| (AL079344) |
| | | arginine methyltransferase (pam1) |
| | | [Arabidopsis thaliana] Length = 390 |
| 961 | 2024961 | 2E-57 >gb\|AAD29776.1\|AF07402_8 |
| | | (AF074021) symbiosis-related protein |
| | | [Arabidopsis thaliana] Length = 122 |
| 962 | 2024962 | 1E-116 >gi\|3738287 (AC005309) |
| | | glutathione s-transferase, GST6 |
| | | [Arabidopsis thaliana] Length = 263 |
| 963 | 2024963 | 1E-118 ) >gi\|3540178 (AC004122) |
| | | calcium-transporting ATPase |
| | | [Arabidopsis thaliana] Length = 985 |
| 964 | 2024964 | Pkc_PhosphoSite(54-56) |
| 965 | 2024965 | 4E-81 ) >gi\|2088653 (AF002109) |
| | | Hs1pro-1 related protein isolog |
| | | [Arabidopsis thaliana] Length = 435 |
| 966 | 2024966 | 1E-12 >emb\|CAB57334.1\| (AL121741) |
| | | WD repeat protein. |
| | | [Schizosaccharomyces pombe] Length = 341 |
| 967 | 2024967 | Tyr_Phospho_Site(325-332) |
| 968 | 2024968 | 1E-135 ) >gb\|AAC50037.1\| (U97200) |
| | | cobalamin-independent methionine |
| | | synthase [Arabidopsis thaliana] Length = 765 |
| 969 | 2024969 | Tyr_Phospho_Site(107-113) |
| 970 | 2024970 | Tyr_Phospho_Site(1025-1032) |
| 971 | 2024971 | 5E-63 >gi\|3176687 (AC003671) |
| | | Strong similarity to trehalose-6- |
| | | phosphate synthase homolog from A. thaliana chromosome 4 |
| | | contig gb\|Z97344. ESTs gb\|H37594, gb\|R65023, |
| | | gb\|H37578 and gb\|R64855 come from this gene. |
| | | [Arabidopsis thaliana] Length = 826 |
| 972 | 2024972 | 1E-22 >gb\|AAD46412.1\|AF096262_1 |
| | | (AF096262) ER6 protein [Lycopersicon |
| | | esculentum] Length = 168 |
| 973 | 2024973 | Pkc_Phospho_Site(25-27) |
| 974 | 2024974 | 8E-74 >sp\|P46297\|RS23_FRAAN 40S |
| | | RIBOSOMAL PROTEIN S23 |
| | | (S12) >gi\|1362041\|pir\|\|S56673 ribosomal |
| | | protein S23.e, cytosolic (clone RJ3) - garden |
| | | strawberry >gi\|643074 (U19940) 40S ribosomal protein |
| | | s12 [Fragaria x ananassa] Length = 142 |
| 975 | 2024975 | Tyr_Phospho_Site(204-210) |
| 976 | 2024976 | 1E-102 >sp\|P30184\|AMPL_ARATH CYTOSOL |
| | | AMINOPEPTIDASE (LEUCINE |
| | | AMINOPEPTIDASE) (LAP) |
| | | (LEUCYL AMINOPEPTIDASE) (PROLINE |
| | | AMINOPEPTIDASE) (PROLYL AMINO- |
| | | PEPTIDASE) >gi\|99683\|pir\|\|S22399 |
| | | leucyl aminopeptidase (EC 3.4.11.1) - Arabidopsis |
| 977 | 2024977 | 1E-63 >gb\|AAD39321.1\|AC007258_10 |
| | | (AC007258) disease resistance protein |
| | | [Arabidopsis thaliana] Length 906 |
| 978 | 2024978 | Pkc_Phospho Site(1 73-175) |
| 979 | 2024979 | 2E-82 >sp\|P51823\|ARF_ORYSA ADP- |
| | | RIBOSYLATION |
| | | FACTOR >gi\|1132483\|dbj\|BAA04607\|(D17760) |
| | | ADP-ribosylation factor [Oryza sativa] |
| | | Length = 181 |
| 980 | 2024980 | 8E-65 >emb\|CAB4l7l2.1\| (AL049730) |
| | | pollen-specific protein [Arabidopsis |
| | | thaliana] Length = 587 |
| 981 | 2024981 | 1E-28 >emb\|CAB56770.1\| (AJ242957) |
| | | SPL1-Related2 protein [Arabidopsis |
| | | thaliana] Length = 812 |
| 982 | 2024982 | Tyr_Phospho_Site(99-105) |
| 983 | 2024983 | 1E-28 >emb\|CAA28192\| (X04507) |
| | | actin A3 [Bombyx mori] Length = 376 |
| 984 | 2024984 | 1E-74 >gb\|AAD28760.1\|AF130253_1 |
| | | (AF130253) membrane related protein CP5 |
| | | [Arabidopsis thaliana] Length = 387 |
| 985 | 2024985 | 3E-38 >gi\|3790587 (AF079182) |
| | | RING-H2 finger protein RHF2a |
| | | [Arabidopsis thaliana] Length = 375 |
| 986 | 2024986 | 1E-94 >emb\|CAB37523\| (AL035540) |
| | | thaumatin-like protein [Arabidopsis |
| | | thaliana] Length = 236 |
| 987 | 2024987 | Pkc_Phospho_Site(52-54) |
| 988 | 2024988 | 1E-112 ) >gb\|AAD25856.1\|AC007197_9 |
| | | (AC007197) dynamin-like protein ADL2 |
| | | [Arabidopsis thaliana] Length = 782 |
| 989 | 2024989 | 6E-20 >gi\|3193316 (AF069299) |
| | | contains similarity to nucleotide sugar |
| | | epimerases [Arabidopsis thaliana] |
| | | Length = 430 |
| 990 | 2024990 | 6E-52 >sp‥O23654\|VATA_ARATH VACUOLAR |
| | | ATP SYNTHASE CATALYTIC |
| | | SUBUNIT A (V-ATPASE 69 KD |
| | | SUBUNIT) >gi\|2266990 (U65638) vacuolar type |
| | | ATPase subunit A [Arabidopsis |
| | | thaliana] >gi\|3834305 (AC005679) Identical to |
| | | gb\|U65638 Arabidopsis thaliana vacuolar type ATPase |
| | | subunit A mRNA. ESTs gb\|N96435, gb\|N96106, |
| | | gb\|N96189, gb\|N96091, gb\|AA042286, gb\|F14324, |
| | | gb\|W43643, gb\|N96027, gb\|N96299, gb\|R29943, |
| | | gb\|T43460, gb\|T43544, gb\|T22472... Length = 623 |
| 991 | 2024991 | Tyr_Phospho_Site(960-967) |
| 992 | 2024992 | Pkc_Phospho_Site(30-32) |
| 993 | 2024993 | 3E-78 >sp\|P29510\|TBA2_ARATH TUBULIN |
| | | ALPHA-2/ALPHA-4 |
| | | CHAIN >gi\|320183\|pir\|\|JQ1594 tubulin |
| | | alpha chain - Arabidopsis thaliana >gi\|166914 |
| | | (M84696) apha-2 tubulin [Arabidopsis |
| | | thaliana] >gil166916 (M84697) alpha-4 |
| | | tubulin [Arabidopsis thaliana] Length = 450 |
| 994 | 2024994 | 3'Pkc_Phospho_Site(40-42) |
| 995 | 2024995 | Pkc_Phospho_Site(21-23) |
| 996 | 2024996 | 2E-61 >pir\|\|S58275 keto- |
| | | conazole resistent protein - Arabidopsis |
| | | thaliana >gi\|928938\|emb\|CAA61433\| |
| | | (X89036) ketoconazole resistent protein Arabidopsis |
| | | thaliana] Length = 140 |
| 997 | 2024997 | Tyr_Phospho_Site(66-72) |
| 998 | 2024998 | 7E-42 >gi\|1899188 (U90212) |
| | | DNA binding protein ACBF [Nicotiana |
| | | tabacum] Length 428 |
| 999 | 2024999 | 5E-19 >gb\|AAD47084.1\|AF165883_1 |
| | | (AF165883) prefoldin subunit 2 [Homo |
| | | sapiens] Length = 155 |

What is claimed is:

1. A nucleic acid comprising a sequence capable of hybridizing under stringent conditions to a sequence set forth in SEQ ID NO:1 to 999, or a fragment thereof.

2. A vector comprising the nucleic acid of claim 1.

3. The vector of claim 2, wherein said vector comprises regulatory elements for expression, operably linked to said sequence.

4. A polypeptide encoded by the nucleic acid of claim 1.

5. A nucleic acid comprising: an ATG start codon; an optional intervening sequence; a coding sequence capable of hybridizing under stringent conditions as set forth in SEQ ID NO:1 to 999; and an optional terminal sequence, wherein at least one of said optional sequences is present, and wherein:
ATG is a start codon;
said intervening sequence comprises one or more codons in-frame with said coding sequence, and is free of in-frame stop codons; and
said terminal sequence comprises one or more codons in-frame with said coding sequence, and a terminal stop codon.

6. The nucleic acid of claim 5, wherein said nucleic acid is expressed in Arabidopsis thaliana.

7. The nucleic acid of claim 5, wherein said nucleic acid encodes a plant protein.

8. The nucleic acid of claim 7, wherein said plant is a dicot.

9. The nucleic acid of claim 8, wherein said dicot is Arabidopsis thaliana.

10. The nucleic acid of claim 7, wherein said plant protein is a naturally occurring plant protein.

11. The nucleic acid of claim 7, wherein said plant protein is a genetically modified plant protein.

12. The nucleic acid of claim 5, wherein said nucleic acid encodes a fusion protein comprising an Arabidopsis thaliana protein and a fusion partner.

13. The nucleic acid of claim 5, wherein said nucleic acid encodes a fusion protein comprising of plant protein and a fusion partner.

14. A transgenic plant comprising an exogenous nucleic acid, wherein said nucleic acid comprises transcription regulatory sequences operably linked to a sequence capable of hybridizing under stringent conditions to a sequence set forth in SEQ ID NO:1 to 999 or a fragment thereof, wherein said sequence is expressed in cells of said plant.

15. The transgenic plant of claim 14, wherein said plant is regenerated from transformed embryogenic tissue.

16. The transgenic plant of claim 14, wherein said plant is a progeny of one or more subsequent generations from transformed embryogenic tissue.

17. The transgenic plant of claim 14, wherein said sequence capable of hybridizing under stringent conditions to a sequence set forth in SEQ ID NO:1 to 999 encodes a plant protein.

18. The transgenic plant of claim 14, wherein said plant protein is a naturally occurring plant protein.

19. The transgenic plant of claim 14, wherein said plant protein is a genetically altered plant protein.

20. The transgenic plant of claim 14, wherein said sequence expressed in cells of said plant is an anti-sense sequence.

21. The transgenic plant of claim 14, wherein said sequence expressed in cells of said plant is a sense sequence.

22. The transgenic plant of claim 14, wherein said sequence is selectively expressed in specific tissues of said plant.

23. The transgenic plant of claim 14, wherein said specific tissue is selected from the group consisting of leaves, stems, roots, flowers, tissues, epicotyls, meristems, hypocotyls, cotyledons, pollen, ovaries, cells, and protoplasts.

24. A genetically modified cell, comprising an exogenous nucleic acid, wherein said nucleic acid comprises transcription regulatory sequences operably linked to a sequence capable of hybridizing under stringent conditions to a sequence set forth in SEQ ID NO:1 to 999, wherein said sequence is expressed in cells of said plant.

25. A method of screening a candidate agent for its biological effect; the method comprising:
combining said candidate agent with one of:
a genetically modified cell according to claim 24, a transgenic plant according to claim 14, or a polypeptide according to claim 4; and
determining the effect of said candidate agent on said plant, cell or polypeptide.

26. A nucleic acid array comprising at least one nucleic acid as set forth in SEQ ID NO:1-999 stably bound to a solid support.

27. An array comprising at least one polypeptide encoded by a nucleic acid as set forth in SEQ ID NO:1-999, stably bound to a solid support.

The application's sequence listing, which the Patent Office published only in electronic form, follows.

SEQUENCE LISTING (999 sequences)

SEQ ID NO: 1 - DNA, 751 bp, Arabidopsis thaliana
caatccatgcttacacaggtctttctcctgttgtcttcttcactgctctagctctcgccttcgccatttaccaagtcatctcaggctggtttgcctcgccgttcgatgatgttaaccgacatcagagagctagatccttggctcaagaggaggagccaccgattcctcagcctgttcaagtcggtgagatcacggaggaggagcttaaacagtacgatggctctgatcctcaaaagccccttcttatggctatcaaacatcagatctatgatgttacacaaagcaggatgttctacggaccaggaggaccatatgctttgtttgcagggaaagacgctagccgagctcttgcaaagatgtcatttgaggagaaagacttgacttgggatgtctctggtcttggtccctttgagctagatgctcttcaagattgggagtacaagttcatgagcaagtatgctaaggttggtactgtcaaagtggctggttcagaacctgaaaccgcatctgtctctgaacccacagagaatgttgagcaagatgctcatgtaaccacaacgcctgggaagaccgttgttgataagagtgatgatgctcctgctgagactgtgttgaagaaggaggagtagagcccatttccaagatttgctctgatttgtcatagagaccagttttatgaaaaggattgtagaatctctaatgttgaagtgtcaatgataatcttgttttactttcccaaaaaatgcggccg

SEQ ID NO: 2 - DNA, 751 bp, Arabidopsis thaliana
tttttttttttttacgagtaattaatatattaataatcaagaacaattaaatacaaattgtcaacaacaaaagaaaaagttaaaacagatcgaagaaagtaaaagatccaacatcatttagtttccatgatcaaagaaatctaaagatttatagatctacggatctgccacattatttcgactttttcttcgtcattttcccggcgaatttccgactattttccgtcacactaaacagagaaagacagcaaaaagagcaaaaataatagagtaagaactcataaaccgatctgagccagaacctggtggtggagtatgatagtaaaacgggaaataagggacgatcggattcggcggaggcggcgtaggatagtttcctgaatacggcggaggatagtaataaccttgaccaccgccaccgtatggtggagggtatttactgcctccaccggactgagaaggaggagggtaatagtaagagctaccgccaccggagcttggaggagaaggagggggaggacatgcggttgtgggggttgacggtggtggaggagaaggtggcggaggagatgattggacaggactacatggattgtcgcatgaagaacacattgtacaagaaacaacctcgtcttttgatgtcactgtcggtgtcactgacactagcagcataacaacaagtgtagacaaagtgtataaatggtttgtttccattgtcagaaactggatttagtaacttaattttgtgcga

SEQ ID NO: 3 - DNA, 751 bp, Arabidopsis thaliana
  misc_feature (1)...(751): n = A,T,C or G
tttttttttattaaagttgactttactttaatctttatgagtcaacacctcatctttattagttagttagctcagacaagtaaaagaaagagcgagaaatcatcgaaatggatttcatctcatctcttatcgttggctgtgctcaggtgttgtgtgaatctatgaatatggcggagagaagaggacataagactgatcttagacaagccatcactgatcttgaaacagccatcggtgacttgaaggccatacgtgatgacctgactttacggatccaacaagacggtctagagggacgaagctgctcaaatcgtgccagagagtggcttagtgcggtgcaagtaacggagactaaaacagccctacttttagtgaggtttaggcgtcgggaacagaggacgcgaatgaggaggagatacctcagttgtttcggttgtgccgactacaaactgtgcaagaaggtttctgccatattgaagagcattggtgagctgagagaacgctctgaagctatcaaaacagatggcgggtcaattcaagtaacttgtagagagatacccatcaagtccgttgtcggaaataccacgatgatggaacaggttttggaatttctcagtgaagaagaagaaagaggaatcattggtgtttatggacctggtggggttggnnnnnnaacgttaatgcagagcattaacaacgagctgatcacaaaaggacatcagtatgatgtactgatttgggttcaaatgtc

SEQ ID NO: 4 - DNA, 751 bp, Arabidopsis thaliana
  misc_feature (1)...(751): n = A,T,C or G
tttgcatttcacaaaaccatgatacaatgctttactagagagacaccattaataaaaaaccgcgaactagaccaaggttacaaattacaggagcaagacaacaaaaaaacaagacttttgaaaatgttcagacgcaaaatagagcataaaagggataaaacattcgcgtcttaaacaagcagaaaacatacctcgagtcccatgaataaaaattatagaacataacataagaatttatatgtaagnnntgcaaaccaagtttatagagccattgtttggttctaaaacagcatcacttagccatcatgaccttaacaaactcttcgtagttaatctgaccatcaccatcaacatcagcttccttgatcatctcatcaacttcttcatcagtaagcttctcaccaaggtttgtcatcacatggcggagctcagctgctgagatgaaaccgttctggtccttgtcgaaaacccggaatgcttccttgagctcttcctcagagtcggtgtccttcatcttacgagccataaggttcaagaactctgggaaatcaatggnnccgttaccatcagcatccacttcgttgatcatgtctnnnanctctgcttcggttgggttttgtccaagggaacgcatcacagtacccagctccttggtggtaatgcaaccatcnncatccttgtcgaataagctgaaagcttccttaaactcagagatctgatcgtcggtgagctgatccgccattgttttttt

SEQ ID NO: 5 - DNA, 751 bp, Arabidopsis thaliana
ccacgcgtccgctctcccaaagcctaaagcgatctctgcaaatctctcgcgactctctctttcaagatgcaaatcttcgtgaaaacactcactggcaagactatcactctcgaggttgagagctctgacaccatcgacaatgttaaggcaaagattcaggacaaggaaggcattcctccggatcagcaaagattaatattcgccggtaaacagctagaagatggccgtaccttggccgattacaacattcagaaagaatcaacccttcatttggttctccgtttaagaggtggtatgcaaatctttgtcaagactctgactggcaagaccattactttggaagttgagagctctgacactattgacaacgtcaaagcaaagatccaggacaaggaaggaatccctccggatcagcagagacttatctttgccggtaagcagcttgaggacggaagaactcttgctgactacaacattcaaaaggagtcgacccttcatttggtgcttcgtctcagaggtggtatgcaaatctttgtcaagaccctcactggtaaaacaatcacccttgaggttgagagttcagacaccattgacaatgtcaaagctaagatccaagataaagagggaattcctccggattagcagaggcttatctttgccggtaagcagctcgaagatggacgcacccttgcagattacaacatccaaaagggtgcgtccatcttcgagacctgcccgggcggccgctcga

SEQ ID NO: 6 - DNA, 751 bp, Arabidopsis thaliana
ccacgcgtccgcttaaaacccaaatcttatcactactctaaaagaatcttcatcatggcctcagtaacctcagccaccgttgcaatcccatctttcaccggccttaaagcctcaaccatcaaatcatccgccaccgtcagaatccaaactgctgctgttgcatcaccgaagcttacagtgaagtcatctctaaagaacttcggagtcgcggccgtagcggctgcagcttcaattgctttggccggaaacgccatggcaatagaagttctcttgggaggaggggatgggtcgttagcttttattcccaacgacttctctatagctaaaggagagaagattgtgttcaagaacaacgctggatacccacacaatgttgtcttcgatgaagacgagatcccaagtggcgtcgacgtggccaagatctcgatggacgagcaagatctactcaacggtgcgggagagacgtacgaggttgctttgaccgagccagggacttacagcttctactgtgcgccacatcagggtgctggtatggtcggtaaagtcaccgttaactaaaatgtgtgtgtgagtaagtgagggagtctcggactcaattagaggctcttctttcacattcttacattattacataaagtgttttgtaattctaaagagtgttgaatcgaatggaccgtgattgttgttgtactgtgactggttccataaatggtttttcttggtttaaaaaaaaaaaaaaaaaaaaaaaaaa

SEQ ID NO: 7 - DNA, 750 bp, Arabidopsis thaliana
tttgaagatcaccaatgaacgatatccattagaaaatcaggtcttccataattcctagatatttctcttacaaaacagaacaatattgacataacaaactacaactaatgaacaacatttcttcatcgttggaggtagaatcgctagaccactatccatggctactagtgatgtttctgtatcattcatctggtggttggaaggaagacccggataaggtccttaacagtgatttttttcctacatgtcgggcatttagcttggagggataacgcattctttatgcactttttgcagaaaatatgaccacatttcgttgaaacctcctgagtaaatggacacagacagattggacagctaaattttggttcctctacaggaggagccacagccttggactttctcggcttgttaagctcaactgagtcaacactagtttgatcagagcgacgccttgtggatctattagcaccagctgactccacatcaactacttgtgatcctctgcgtgcacttctcgatttgtttttagcctgagcaaaagcagaagcagttgattcaacaacatcatcatcatcttcaatagcaaccacattgatcctaggaggagtagccacaatctgaggcaccgttggagcttggtcagccacttgttgatctccctggtgttcgttttgagtcacaccatccctccttcgaagtctcatactagtcctcaccacccgagaagccatctttccggacgcgtgg

SEQ ID NO: 8 - DNA, 750 bp, Arabidopsis thaliana
  misc_feature (1)...(750): n = A,T,C or G
ttgctggaagtaggaaaattagataagagtactgatcaaatcctaagagagaatgtccggcgtcacctcggagcctattgctatggatgccactcggttccagcacactccttactactgcgaagagaatgtgtatctgctctgcaagacgttgtgcgagaatggtgtagcggaggcaacgtgttctgatttgtttgttgtttttatctccaatgagaagaagcaggttccactttggcatcagaaagctagtaccagagctgatggggttgtactgtgggattatcatgtcatctgtgtccagaggaagaaagaaagtgattctgagcctttggtgtgggatcttgattcgactttgcctttcccttcacccttagcctcatatgtgactgaaactatccagccatcttttcagcttttcgcagagtaccagaggttcttccgcattnntcatgctcctctgttctttaagcatttcgcttccgatagaagacacatgaaagaacctgatggaagttggactgctcaacctccaccctatgaacccattgttgcccaagatggaatcttgcacaatttgagcgagtacattgccatgagcggtgcggatacatnnncaagcttggatcccgaaacagttacagcannaatttcacagaaacttggtgttgtggtgagccacactcagcttcaggatctcttcaccaagcttccttagcattccaatgtctttttcttatgggatcaaaa

SEQ ID NO: 9 - DNA, 750 bp, Arabidopsis thaliana
  misc_feature (1)...(750): n = A,T,C or G
gcgaaaagcgtccattgtctaatggataggacataggtcttctaaacctttggtataggttcaaatcctattggacgcaatataaatatatctatattgatatttatctattatttccatttctatatattatatataatatctatttcgaaaaaagataagaaataaatagaataagaaagaaattctgaatgctttaagatttaatattaaacagatattagttagatacttctttctattatatatacttgacttatagacttctatttctagaatttcttaaaaaattaattaaaattaaagagtaaaattgactaaagaatcaaaaattaagaataatccgtttcgttttttatactttctcctgaagtaggaaacgttctagttgctcttgaataccttctttcaaaaagctttctgcttcagcggttaatgtcttggtagaggctatgatttcttgaaactgaggtttattcgtttttaagtaagtgcgtaattgaacgagaaattttcttacttgtccaatttctaatccatccagataaccatttgttccggtataaatggtcattatctgttcttccactgtgaggggggctgattgggattgtttcagtaactcacgcaatcgttgacctcttgccaattgatnnngagtagctttancgagatcagaagaaaattgggaaaaggcttctaattcagcgaattgagccaattccaattttaattttccagctacctgtt

SEQ ID NO: 10 - DNA, 750 bp, Arabidopsis thaliana
  misc_feature (1)...(750): n = A,T,C or G
gtcaatctcttcttcgtagtacacggttagcttccccttcgttactccgtccttacacaacaacaaactccaatcctcagtctccgttaccttgactctaggaggtttcgtctccataaggagagcagcctttgtcgcttgtggttttggtggctcaagaaaagattcatctattaagccattgtctctaccacctccgctggtggtggtagtggtagtggctcggatccgccagnnnctaacggcggccgtcacgacggcgatccatgtccaaagattgttaaagacgaagttaacgtagtcgaaagccaaaacctctaacggagaatccaaagtcgccatttctgaaatgtttttattatatcctaacgaagaagattgaatcagtggttatataaagggagaaagaaagagaggattagtatggggagagattgaatcttagccgttggatggatctgaagagagatagatggtgagccattggatcttgacaagttgaacggtggatctttcatagatgctgaggatcaagaccgaagatgcttgtagtgaagaaagatgccctaataatgcccaaaatctgattcttaattgtatttttttagttttctgacacgtgtttggtgagaaactgaactcctgacactgtcgtatattccttcatgttttgccggctggtttttgccaagtgtttatgaaataagacacgtggtttaagtttaaaaaaaaaaaaaaaaaaagcggccg

SEQ ID NO: 11 - DNA, 749 bp, Arabidopsis thaliana
tttttttttttttatcgaaacggcagatatatctcaatatatatagtagtatagctcaaaacagtttgtggttacaaaaacacgatgacaagaaaacacaagaccatatgcagttctttgactaatacaagctattaaggcgttatgacaaccgcattgtgtacaccaaaaagaattctaatcgacaaattcaacaacggatagtatcatctgcatgtagcagaaccatcattcagcttttgctggaaatttattgccaccagtagcgatcttgtatacgtaaaaacaggtcatgagagcactgatcccagcaaccaaaccagccggcataatctttccagtcagcaagtaacgctgtcccatgactagtgtgagagcagctgcgatgactgtctgaagaaccatagcaatagtggaattcttcttcttctcaaaagctttgagactgatataaccagcgagaatgagtaataatccagtgcctgcacctccggcgaaagatgttatacttcctttcttcatgtacccgataaatcctccgccgatgagaagcatcccgtacgggatagtgaagcaaaaatcatgcatttttctcgtgctgggtttcgattattttcaccggtgatgaagaaaattgaaagagcgatcgcaatcgatgaattgatctgatagagacgatggatcgatgaattgattttatgaaagtgttgtgtggtgagcgcgtggaaaaggtccgccttttttcgtca

SEQ ID NO: 12 - DNA, 749 bp, Arabidopsis thaliana
  misc_feature (1)...(749): n = A,T,C or G
caacaagagtcattacagggtaaggtgaatctatagcaccaacagaaagtgtgtcccgatactatgatcaatattctaatcaaaacagaaaataagtatcccaaaactataatcatattnnnacaaaagtaaatcagttccttctttgctttttgttcgtggtttggtttncctttttcttccacttcttatttgtaacagctctactcttctcctcaatctccttaactttacgcttcctgtactgagaaactttgggatctgaaaccaactcatcagcaagagttgcttttctattcttcttagtcaatcttccatagaactcttcagctggttcaattactgtaccaatctggaaatatttttcagctagctttgaccgtgacacagatttcttgtagtgtacagcaggatccattacagttctcaacttaagcaactgaagatctcttttcaactccggagtcattgttggtgcaggcatatcaaaccagtttgaaccagttgtgtctttgatttgtttcctaatcatcttattaatcttctttggatcattaggaggaagacaaagaccatcaacaagctctgacttagacatccagagagaactgctttcgtgactctcaactcttttgcttgaagtggaacatgttttcgtgtctaaggataagcctggaagctttggttcccacgtaagacctatcaatggtttagtctctgccattactgtaaattgcctttgttctctg

SEQ ID NO: 13 - DNA, 749 bp, Arabidopsis thaliana
  misc_feature (1)...(749): n = A,T,C or G
ccacgcgtccggcactggagtactgatgtgtcccatgcacccgaatttacatatagtaatgtccacctcttaccaaaaacaagtcatttatggatattatccggaggttcatgtggatctagtctaattcgtttttcgatccataaagatcaagatcaaatgaatataccttttctttccgccgaaagaaaatctatttctagcctctcagtgaataatgatcaagtgagccaaaaattttttagttccgattttgccgatccaaaaaaattagggatttacgattattcagaattgaatggaaacttaggtactagtcattataatttaatatattctgctatttttcatgagaactcggatttattagcaaaaagacgaagaaatagatttctcattccattccaatcgattcaagagcaagagaaagaattcataccgcagtcaggtatctcggttgaaatacccataaatggtattttccgnngaaatagtatttttgcttttttnnntgatnnnagataccgaagaaagagctccggaattcttaaatatgggactctaaaggcggattcaatcatccaaaaagaggatatgattgagtatcgaggagtccaaaaaattaagacaaaatacgaaatgaaagtagatcgcttttttttcattcctgaggaagtgcatcttttacccgaatcctctgccataatggtacagaactatagtatcattggagtggatacacgactcac

SEQ ID NO: 14 - DNA, 749 bp, Arabidopsis thaliana
gtccgcagaagaagccgcagtcctcgtaggaggtcccgagatgactatagggaaaaagactaccggaagcggagcaggagcagaagctatgacaggcgtgaaaggcatgaggagaaggatagagatcatcgtcgtcgcactaggtctcgtagtgccagcccagatgaaaaacgcagagtcagaggccgttatgataatgagagccgcagtcacagtcgttccttgagtgcatctcctgctcgccgcagccctagaagttcctccccacagaaaacctctcctgctagagaagtttctcctgataagcgtagcaatgagaggtctccatctcctcgtcgcagcctcagcccaagaagccctgctttgcaaaaggcctctccttctaaggagatgtctcctgaaaggcgtagcaatgagaggtccccatctcctggtagccctgctcctctgcgcaaagttgatgctgcttctcgaagtcaatctccttatgctgcggaatgactgcagccacttgtgaaagtgatacggtgtatgatgaaaaacacgtttgcttgtactgatgatgtttcatcattaagcactggaacgtctaccttctgtagtattacttgctttccgtaggtgccctcaaactactgagtactgactgtatctttgtttcctgttatcgttctggtttagtgttcatgtgcaagaattattactgtttgaacagcctttttagtctctgttttatttgaatcttctct

SEQ ID NO: 15 - DNA, 749 bp, Arabidopsis thaliana
  misc_feature (1)...(749): n = A,T,C or G
ttttttttttttttttttttttttttttttttttttttttttttttttcctggaactgtaannnatactttttcctacttgtgattcccaaattcatttaaacgtataattgtaaaatacactgttacacattacaatgcaaaaaccggaaaatgcaggagattactcaaaactcagagagatttcttagttctgttaagcttcaagaactttgttttcctattccaccagcatggctatagtatattttactttgatatccttagtttgtatcctttcttgcttcgcctatcaccacgtcgagatcagtacctgatctactgttcgcatctaatcttgtttttcatttccctgagatgaattgctgctgctgggcctatcatctccaccatcacccttcttgagtcttaaaaaggtcaggacactgtttacaagaaacttgagcagcttcacaggctttcttacatcgaaaggaaagtatctatacttgaacatgtgcacgattaagcgtttcatagttaaagaatacaaaaccaaccagtaacacaacaagatcggccagaacacaggcacatccaggaaagagaagaatgtcatnacaaatgcaacaacaaatgctttagtcgctgcataccagaacttgaactcaggaagnngacgaannnagggcttatactcatcagactcatcaacaggtaaagaatcaggatccaaagcttcaagttcaggatcaactttaggggaaagga

SEQ ID NO: 16 - DNA, 748 bp, Arabidopsis thaliana
  misc_feature (1)...(748): n = A,T,C or G
gaaacaaatcaaaacccattttacatcaatgggtttaaattaattatcttctctttcctaaannnttaattacccctcccccatatatttaaccaccaanaaaacggatttactttacttttttttttaacatttcaaaacctccttcgtcggtccatgaactcatgtattctcttcaacgcaatctccaaagtgttctcactcatattagcaaaacaaaccctaaaccatccgacctccgagcagtggcacgaagatcccggagatatattcaggttcagctcctttaagatcacatcccaaagctggagctcgccgtctttagttttcttttcgagcaagaaacccaaattcatccaacaaaatagccctgcgttccctttcaaacactcaatccctgccttcttaagcccttccacaatggtatcgtaccgtcttctaagtctttcccggtttatcctaatgtacttctccgtaaactcctcatccgacaacatagaagccagcatatgttgtgtctgagacgagacaagcgtgaagctcgacatccttctcgctgtccgaacaacattatcgttgtacgagtatatagttcccacgcggaaaccaggaagaccaagatccttggagagactgtagacgatgtgaactcgttcctttactgacacgtcatctatgttttctacgatctcggcaacgcttgtgaactcggaggcatggaagacggagccggagtagatctcgtctg

SEQ ID NO: 17 - DNA, 748 bp, Arabidopsis thaliana
cttttttttttttttttttttttttttttttttagctgttaaatcagtaattaattcagaatattaaagactaataacactcaacaaagcatattaattataaaaagagcagaagatatagaaacaaccttatatagttaaaatcaatattcatcaatcaccacatacttctagggtttttaatcgccgtcactaaaattaatctgctaatacgaatcatcaccgtcgactaatctaatctccggcgaaatctttcaaatcctcaagcaccaccaccattactcatcatcttcttaaactcatcaaaattaacgcaaccatcaccatcaatatcaactttactaatcatcttcttacaatcttgaacagagcacttctcacccaaattcttcatcactgaatgaagctctttcgccgagatccttccattaccatctaaatcatataactcaaacgcttctttcaaatcgcttacgtcgtttcgattattacctcctcctccaattccgatttggaaaagcgcgacgaattcgtccagatctatgaatccgttaccgtctagatcgaattgtttcatcatcgttactgtttcttccggtgatgctgttggtgagagagcgcggatcacttcttttagctcgtcgacggagattttcccgtcgccgtttttgtcgaatcgttggaagacttttttgatgtcgtccattgatcctaaacagctacgaacaactccgttcttcgatgacat

SEQ ID NO: 18 - DNA, 748 bp, Arabidopsis thaliana
  misc_feature (1)...(748): n = A,T,C or G
ggacaaaaaagaagtaaagacgcatcttcctctactagtgcagcagctcgcattcgtctcgacttgtcatcaagctctgggaagaaaacacgtcaagctagtgaaaacaaaaagaagaccttgaaagtggctccaaaaaagagacagcggacggtaaagcaagagaaagaggatccggttagtgcagcttgtcaggattatatcgagaagcagaaagcttactttgcagagattgatgcatttgagctgccagtagaagaggtatctaatagcgactcagactaagtaagaagagataacaatcttaaggatatcatagagacaccataacccgttcgtaatcactgtatagctaaggagtattctcacaggaaatgtttcactggtcacttagtacacatgacacgtcaaatctgtgtatacaaaatatctatcggtttataatatttaacatcgtttcagtgggagaacgttcttggttctacttagacatgaattgacgaaaaagcctgtccacaatacacaggtaaggccacgactgagagacaaactatatacttacattcacacaccaataactataacactctctgttcaatgaggcgannngctcatagannnnaccaagctttattcacataatcaagctttattcatgtcgctgatgattagagctttacctgtnnnntcatgtctcttcataccctccattgacccagagaacagagctcttgtcacactccccatt

SEQ ID NO: 19 - DNA, 748 bp, Arabidopsis thaliana
agtgtatacaaaggttgttgtggagcttttatcagatcacaggaataagatggaggtatttggaaaatctcccatggttgttacatctgccaatgttatttacttgtctgcaattctgggtcgcgattgcgatggacacaaatgtgattggaaatgtgagaatgaaaatgtttgtgggaatatgtatcgctgcaaactaactggactaactcatgtctgcgacaagaactgtaaccagcggattctctatgataaccatagctctttgtgccgagccagtgggaggattttccctctctcgtccgtcgaggagcaggcggttaaaggtgttcggaggaagcttgacgccgctgagagtcatccttctgagagctgttcgtttaagcgtcgtcgtcgtgatgctcagttccatgcttctcctttcgagaggtcttttactgctgtgagccctatctgcagcccggctggagacggaatggagttggtttagattccatgttgatctccgcaaatcctgagactgagaggcctctttatcttacgtagaataacttcccttttctctttcttttggacaactatggatatgagacattgtgctattgctctcgcagggaggtctaggcatatcctccctgccttaaagagagcttttatcttagtaatgttgaactttatgtagtacttatgtaggagagactttataattctaatgctttattctggatcttaaaaaaaaaaaaaaaag

SEQ ID NO: 20 - DNA, 748 bp, Arabidopsis thaliana
cttcttctcttggcctctcacttgaatctcccacaaagcgatcaatcacaaattccttcttctctctctttcttttcgtccccaagaatcaattatgaaaggagctaaatcaaagactgaaaccaggagctccaagctctctgtgaccaagaagccggctaaaggagcaggacgtggcaaagccgctgcgaaggaccccaacaaaccaaagaggccagccagtgctttcttcgtgttcatggaagatttccgtgagactttcaagaaggaaaaccccaagaacaagtctgtagctactgttggaaaagctgcaggagacaagtggaagtccttgtctgattctgagaaagctccatatgttgctaaggctgagaaacgcaaggttgaatatgagaagaacattaaagcttacaacaagaaactggaggaaggtccaaaggaagatgaggaatctgacaagtcagtgtcagaggtcaatgacgaggatgatgctgaggatggtagtgaagaggaggaggacgatgactaagaagctgaatgttggtagcattagtatagatggctgcaaaaatctctctgtttttatctttacttgaaatgttaacggggctgattaaaatgggtctttctttttatctttttatatttccacaatctctcacgaaagccctctgaatggagaaagtgaattgtagaatgtttagatggtgaaagagagacttgcagctctgtactctttgctttataa

SEQ ID NO: 21 - DNA, 748 bp, Arabidopsis thaliana
aaatttgaatacaaagaccacaatacttcacacacaaatccaaccttaattgattcggatttttttttttaatacaaacaaagagagacaatacaaacatctaaggattggatctgaaaggatttcgctggtttgatcttggatctacccttggcgacgatgcattgtatccatgcagcatttctctgatctttgagtacatcactgcttgtgacgcttcaccaccattcccaccactttcctgctcttttatcttttcaaacagatactctttctctgcctccgcctcgctcagcctcagtttcaaatagttacttgcgtattcctcttctgttttctcctttttcgctttcacaatcctttccaatctctctgcttccacttttgcctcgtttgcttttaactgaaacatctctgcctctgcttgcttcagcctcactatcctctccacctcttctatctgttgtttcttcttctgcctctccatctgcagttccgccacttgctttgctttctcttctacctctctctcgcattcctcaagccccattcgcgctttcttgtacatcctcgtcttttcctcacccactatctccattttcctcagtgtttcctttacaacttcagcaattcggttgcatgcatcttgaggtgctatcgtacccccaccttctccgctttcaaggctctttggagagtccaattcaatttcttggaaaaacatgagtatcaacttggccgctgttgc

SEQ ID NO: 22 - DNA, 748 bp, Arabidopsis thaliana
tttttttgatctttaattagtctctaacattgaaacatgaagaggccttttcagattgtattattagtacaaataccaaaggtttcaataaaggtcaaacaaacagagcaaaccgaatttgctctaaccacagaacccaaaagattataaaaagaagaaaaagaaagaaaggccccaaatcacaaactccggcagtgtcaaccggtacaattgcttaatacacactgtagagaaaagacaagcttggaacttccaaaaaacccaatcagaagcaacttcaagagttacggatcatcctttcaagggttccagaggagtgtagtctctgcaatcatggaagtaacaacgtaagggtccatgtttgaagctggcctcctatcctcaaagtatcccttcccttctttctcggtgtcacgtcctactcggatcgatgcaccacggttcgcaacaccccaaaggaaagtgttgatgtcagcagtttcatggtgtcccgtgagacgacgctcgtttccttcaccgtaagcggaaatgtgttccttgtgtctcaagccaagcttctcgatcgccttcttgattatctcgtatcctccttcttccctcattgatttagtactgtaattggtgtgagcaccagctccattccagtcaccaggaataggttttgggtcaaaagatacaaccacaccagcaatctctgtgatcctctccaaaatgtaacgagcgatccatatttcatcagcagctgaga

SEQ ID NO: 23 - DNA, 748 bp, Arabidopsis thaliana
accaccatctctattttcttcctttcccctaagtcttggttcttcttctctctaatacgagaagaaaaaggcgaaaacctcgccaatccgattacgcgaaaaatcaaaggtttttggatatggcgtcgaagcggatcttgaaggaattgaaggatctccagaaggatccacctacatcatgtagcgcaggtcctgttgctgaagacatgtttcactggcaggcaacgataatgggtccttcagagagtccttatgctggaggtgttttccttgtaaccatccatttccctccggattacccattcaagcctcctaaggtggcctttaggaccaaggtgttccatcccaacattaacagcaacggtagcatttgcctcgacatcttgaaggagcagtggagtcctgcgctcaccatttccaaggtgctgctatcgatctgttctttgttaaccgatccaaacccggatgatcctttggtgcccgagatagctcacatgtacaagactgacaagaacaagtacgagtccactgcacgaagctggactcagaagtatgccatgggctaaatggaaaatcccacctactaaattatctctttatgaagaaaaatctgccttaatttctatgtatgattcgatagacatctctttgtgtccttttaactttctgaagacaggaccaaatgaagtgggtcttgttttaaacgaaacaaaaaaaaacatcatctttgtgaaaaaaaaaaaaaaaa

SEQ ID NO: 24 - DNA, 748 bp, Arabidopsis thaliana
tcgagcggccgcccgggcaggtattgcttcatcattaccaaatcatcaacttaatcgtttctctcaaatttagggttttctcttttcttgaaagtcttgcggttttctgaatcatctctatctggtttgagggtttcgtttgatatctggagaaaggggtttctggaaacaaggagttcataattcgcgatcttgatctatcgatcttcatttatatataaaagcgtgaatgagattatgatggagtcgaaaggtggtaaaaagaagtccagcagtagtagttccttattttacgaagctcccctcggttacagcattgaagacgttcgtccaaacggtggaatcaagaaattcaaatcttctgtctactcaaactgctccaagaggccatcctgagtaccagcgtgcaccgatcttcataatatagttatagctttctttactttccagtttataattttcttctttcaaagctccttttctgctggttcccggatccaatcgttctctcctcctactacaagtcctgtcgctcacacaacaaggcgagatggccttatctgcaatcggtttcgaaggttacgagaaacggctcgaggtgactttctttgagccaagcatctttcaagactccaagggactgggactccgtgctctgaccaagtcccagcttgatgaaattcttacacctgctgcatgcacgatcgtttcatctctctccaacgatcaattggactcttacgtacct

SEQ ID NO: 25 - DNA, 747 bp, Arabidopsis thaliana
  misc_feature (1)...(747): n = A,T,C or G
ttttgtgaacatgaatcgatcaaactagacaaataaatgaagacacagtttataaccactatagttatacnnnctaacaaggaaaacacagtttaaacaaanaanaaaactaaactggtaactatgagaataaatacctaacaagacctatgatnncctccgaaacagtgatgttaagaggaatgatgaatacttctggcacatcaaatgtacaaatgcttaaccacaggctagttcagtttcatcttctgcttcttttccttggctgtttatcgtcttttcccgattccntacctcgttttccagtagccacctctgctgtttctttcgtttgttttcgtttcgatgagctcttactattattattctctacctcaaccttctttttacccgtactactcctcaattccctcggtttcactttactgttctctttcttaacgtttccatcactcttcttctgatgatcgttctctttcttaacgtttccatcattcttcttctgatttttactcgttgtttcttttcctttctgtggagagttcttctttatcctcttcaagaaatcagccacgctcttcttcttatccgctactgtcttcttctctgttttagaattctcttccttctcatcatcatcatcgtcagatgattctgttttcgtatccgtttgtttcttaatattattcttggctcttcccgttttagtatctttagcaacaacagcaatctctttgctcgttctcc

SEQ ID NO: 26 - DNA, 747 bp, Arabidopsis thaliana
  misc_feature (1)...(747): n = A,T,C or G
gtccgcttcaaacaatggcggtttcaaagcttgcattgcctgctacgagtggtaagagttgcaaaatactcttagggctgagattacttgccctctcagccacgttatctgcagctattgtaatgggactcaacaaagagacgaagacttttgttgtgggcaaagttggaaatactccaattcaagctacttttactgctaagttcgaccacacaccagcttttgtgtttttcgtagtagctaatgcaatggtgagcttccacaacttgttgatgattgctcttcnnntatttggagggaaaatggaattcactggttttcgtcttctctctgtcgccattcttgacatgctgaatgtgactctaatttcggcggcagcaaacgcggcggcgttcatggcggaggtaggaaagaacgggaacaaacacgcgagatgggacaaaatctgtgacagattcgccacttactgtgatcacggcgccggagcattaatcgccgcattcgccggcgtaatccttatgctcatcatctccgccgcgtcaatctctcgtctcgtccaacctaataaatgctgctccaccaccgcatctccctcggtcgnncnctgaaaacatacacacgtgtcacgttcccctgttattttccttttcttttcttacttctttgtttcttcttgagtgtgtggtgtgtatctcgagtgaatgtgattgatcagattgtgtaagcatttggctcgtctcttctttg

SEQ ID NO: 27 - DNA, 747 bp, Arabidopsis thaliana
  misc_feature (1)...(747): n = A,T,C or G
atggaagaagctgatattttaggtgatcgaatagggatcatggctaaaggcaggctccgctgcattggaacctcaatcaggttaaaatctcgctttggcacgggatttgttgctaccgttagcttcatcgaaaacaaaaaagacggtgcacccgagccattgaaaagattctttaaggagcgtctaaaagttgagccaacagaagaaaacaaagctttcatgacttttgtaatcccacacgacaaagagcaacttttgaaggggtttttcgcggagttacaagatagagaatctgaatttggtatcgcagacattcagctcggtcttgccactcttgaagaagtgtttttgaacatcgctagacgtgctgaactagaaagcgcaactgttgaaggaactatggtaactctcgagttagaatcaggcatcgcagtcgagatacctgtgggagcaagatttgtaggtatccctggaacagaaaacgcagagaatccaagaggaataatggtggaagtgtactggcaacaagacgggtcaggatcgatgtgcatttctggacactcggcggagatgcggatcccagagaatgtatcggtgatatatgaaccatcatcacaagtattangacatggacagcgacgagttcggggtattgtgattgattatgaatctaacaattaacannnnnttcttgngcagtttggggcaaaaaatacttggtttacgctggagtttaaaaacagtcat

SEQ ID NO: 28 - DNA, 747 bp, Arabidopsis thaliana
ttttttatcgaatgataataatatttaaaatttccttattgatacgaaacatatatccctcgacaatacatatatagcggtctttattatttttatgtagaccgatcgatattgacctcaaaatcattacataatatcaaacgcgatcaatggccgaaacaagcatgtttctggaatcaggctgcccaatgagctcattgccacagtcgacaaattggtagtcaacaatgagatggccttgttgatagccaaaaccatcggtgtctatttgattgaacattgctacatccaaatccaagcctccgttgctgcattggtccactattctcacagttactgcagcatttgttcttgtgttcttcacccttaaacacttgccgcaagaagcttgaccacgaggtcctgccggcccgcagaaggcggtccagccatacttgctccgccatgcgtacggcttatcagcatcccacgtggagcaataagcactcacggctctcaaatcccaattattctgcgccggattatagaaatggtaggtggcgcgtacgttcgacgcgctctcccctggtccgctaggcccacttccccaacaattgctctgacagttgttggtcggagaacagtagtccgcggtggtaccacagtaaccgtactgactgcagcagatgttaccgggacaagttcgaccaccgccttgacgaccgcattgttgtccggccaccgtagccactgtgtatgataaaagta

SEQ ID NO: 29 - DNA, 747 bp, Arabidopsis thaliana
  misc_feature (1)...(747): n = A,T,C or G
ccacgcgtccgtcgggacctacttggtcacttgctattcacaagcggccttaggttgcgttttcaaacttgtggagataaacaatcagcctcggattaaactttctgaagatgttacaaaggtatcaataccgtgtaaaaagcgaagttacagattatacggcaaagaaggttaccctctggtagatataatgactggagagaacgaaccacctccaaaggttggtgagcgtttactttgtcgtcacccattcaacgaatccaaaagagcatatgtagtgccacaacgtgtcgaagagctcctcaaatgttattggcgtggaagtgcagatgaagcaagagaagtattaccgcctttgaaagagataagagaccgttgcatcaaacagctcgaaaacatgcgacctgatcatatgaggagattaaacccaactccttataaggttagtgtaagcgcaaagctgtacgatttcatccacttcttatggctaaacgaagcacctgttggtgaattgcagtgacagaacaaccaaaaagaagaatctggttttggtttggtgtaatgtatataatttatataccacagcatcacaaatatgcatttttttcacttttagtttctttttcttacaacattttgatgatctcnnattgtcgtagtaagtttcattttcttactgaggaaagaaactctctgcgttcactggaactttgttttcaactgattcaataagattttatatttaca

SEQ ID NO: 30 - DNA, 746 bp, Arabidopsis thaliana
  misc_feature (1)...(746): n = A,T,C or G
ttaaccaacaaatttgattttcattcaatccttaaaagattacaaatggaggaaaaagttagtgcatctctaaaatgacaagaaagagttacataaaagcaagaacaaacttggaagttggaacacatctccaataccttccttatacaacccttttattgttcgctgaatttacaaacaaataaatcttatgcatctaatttaaattatatgaattgatcacacagaagaatatttgttaaaattaatcaagtgtagatagatgatgcatctctgtagcttcttcttgggatagaagcatgaacactagtgctgttcatgttgctcttgttgttgttattgttgtgagtggtgagagtnnnnnntgagttctcatgattttgctgatactcttgtctgttttgatgaagagagtgttgttgcttggcgttgaaggaactatacctaccttgcttctgatgatgatgaggtcttcttctaggctgagacgatttagggatgaacacaccagtccctttgctctgttcttgttgatacatatatggagccgtttggtaacctcctctgaacaaaccctggaatgagagagaggaggaggaggaagagagagaaacagggtttaagtgttcatcttcatccatgatgagaagagagatctgtttgcttatgtctgcaaagaagacatcatcatcaagctctaactccatagccatagctcttagctttccaagtttcttgaagacttg

SEQ ID NO: 31 - DNA, 746 bp, Arabidopsis thaliana
  misc_feature (1)...(746): n = A,T,C or G
gacgttacttacaattacactactaacaaaaagaagacaaatatttttcttttctggtcatagacaactgttgggccgttgaaatcctgcctcactacctccagcgtgactacaatctgttgttgctggtttattccggtacgtcaacttcacatcttgaattcgaattcccgtgcacggcttcttagagctacagtctaatttcactccaacttccgtcgccgatgtcccgtgtatatcgaagaacattacatcgctgatttttatcccagaaacctgattagggcaattttcgttgccagggcagtagttttggtcaatgacgattgggttttgtacgttgttcataacacaatgctnnaaacggatatncttagcaaatccattactgggnnnggcccatgactttattctcaccccattctctgttcctgtaaacgtcgccgttttcactgttatgttttgtacacctacctccacactttcttttcccaagcttccaatgctgatcccatggccagggccacaagcgacattctcgatccagaggccgttagtgccgggaccgatggagacacaatcatcgccggtggagattttggagttgaggatggagacggtagatgatgactgcacgtggatcccatcagtgtttggactgtttccgtctgcagaaactttgactccgtcgagctttacgttactgcagccgttaatcgcgacgtgaaacatctgactgttaagtg

SEQ ID NO: 32 - DNA, 746 bp, Arabidopsis thaliana
aagtaaagatcaaatccttgaaaaaattgaatgggatcggtcttgttcaccagctaagctatgaacataaggcttatgagaaatttgcaaataaaacgatttctgtttgagagaacattgttgactttaacaatttcggtttccgatcaatctccactttgagctctttcatgaaactcaaacaacagaacatatgctgctgtcactgaaattacaagaaaaccagaaactctttggtagatgatatcattgaatgcacaacttcgatgctacttttcactggacgatagctaacaagtcgctttctttgcaaaagcaatgcttagcatcttctgttccaaaatcaacctcataggcgctcatatcagagaacaaaaccttcttgccaggttccacttccccaacctcagacccaacagagacaacctcgcctgttaggtacctctcgaatttcacagctgatttaggcaacagtactcctcctgaggatttctcaggaagcacttcaaggcggacaaggaccctgtctgcttgtggtacaacctttgccggttcccatttggtggaaacggcgttaattctaaaggaatttcttcgaattccgagaagggtctgctgaggtagagtaggagcattggttttgatggggaaggacaagaagggtttaggtactgtaatgaaactcgaagccattggataaggttaggttcctactcggtgagtagtcacgacacggcgagctatta

SEQ ID NO: 33 - DNA, 746 bp, Arabidopsis thaliana
cttttaattataagatagaaaaactaatcccaacaaaggaaattgaaacgaactgtacattatttgagtgatcactatattctttgtttgttcaaagctaagaccatactccataggagaactcaaaatgctccaccaattcaatcgcctacatttatatatatctagaatcaaatcaaatcctccaattctaacaaaagcactagcatcgacgcattctcttccactccttgcgatcgaggaggaagaatccatatactacataccatatagcttgcatcgtctaatggctttaactttattacttttttctttaacaactatatagacctttctaaaaatgttttgctgagttcactctgttgtctgttcgatcgaacggagctcccagtttccttctccatcaatcagccttagctccaaggaatggaatgggatcagagccggccgttgtgatgaggttatgaaagtgactcccatgtctcgtgcaactctatagagctgttcctcaacatcaacactcgtcgcatttgtgcattcatcaaggactccaaacttcggcctgtgaaagaataaacgtgccatgcctaatctctgttgctctccaagagataatatgtcttcccaattggtagtagcatcccaaccacctacgtctctttccaagagataaactaaccgaacattctccagaatggttttcaaatgagaatccagaatgcttccagcttctgttgagctctctc

SEQ ID NO: 34 - DNA, 745 bp, Arabidopsis thaliana
  misc_feature (1)...(745): n = A,T,C or G
tttgagttttattacgatgacggatccggatcgggtcttagaccgcttccggattctgtatctgagatcttgatgggatctggattcgagcggttacttgaacagctaagccaaatcgaagcgtcggctactggaattggtagatctggaaaccctccggcgtctaaatcggcgattgagtctttacctagagtcgaaatctcggattgccacataggctcggaggctaattgcgctgtttgcacggagattttcgagacggagacggaggcgcgtgagatgccgtgtaaacaccttttccacgacgattgcatcgtaccgtggctatcgattcgaaactcttgtcccgtgtgcagattcgagctaccttcagagcctaatcgacggagcaacaacaacgaggaggataacgccgtggggatgacgatttggagacttcccggtggtggattcgccgtagggaggtttaacgcagcaatgagagacggagagagagttttgccagtggtgttaacagaaatggatnnnngtgggattggtaatagccaggatggtcctagacggatctcatgggttaggtcacacggtacactcgaatcggatagtaacggtactggctcaggttccggctccggtggaagattgaggaggatggttcgtggaatggtgtcgttaatgaggagagtgagaccaaaccgtagctcttcttcttcatcagctgcgatatcaacttcttctgataatc

SEQ ID NO: 35 - DNA, 745 bp, Arabidopsis thaliana
  misc_feature (1)...(745): n = A,T,C or G
ctcttcttagaaccatcaccgattcgaacagatctaataaatcgtttttttcaccagatttttttcgccggagtttgttttgatccattctgttatggcggaagaacacagacttcaagaaccacgattatgtgctaacaattgtggcttcttcggaagcacagctacacaaaatctctgttccaaatgttttcgagatcttcaacatcaagaacaaaactcttccaccgccaaacatgctcttacccaatccttagccgccgttggcgctgctgcgtcttcctccgtgtcgccaccgcctccgcctccagctgattcgaaagaaatcgttgaagcgaaatcagagaaacgagcggcggctgaaccggaggaggcggatggtccgccgcaagatccgaagcggtgtttgacttgtcggcggcgcgtgggaatcacggggtttcggtgtaggtgtggtttcgttttctgcgggacgcataggtacgcggagcaacatgaatgttcgtttgatttcaagcggatggggaaggataagatcgcnaaagcgaatccgattgtgaaagctgataagcttgagaagatttgactttgttgtttgttgtttgttgttgttgctttggttttgtgcgtttgaatgaaacacacatgaagaagaaagagcaagaaacaaacatgtcaatgtaaatttaagctttatttgatgatttcttcagtttggttattaaatttgcttattattgaaaaa

SEQ ID NO: 36 - DNA, 745 bp, Arabidopsis thaliana
  misc_feature (1)...(745): n = A,T,C or G
tccgaagttgcagctttggatgctaaaggtaaaatatttgaacagtcaattggttattgctcgaaaggaatacagcaattgtctgaagcaactgcttacaagatcgtcttccacgatctgagcaatgttctctgggatggtctgtacctcggggaagttccttcctcaaggattgagccgtttcttcaagagctcgaacggtgccttgagattatctcctcatcggttcatgacagagtccgaaccagagtcatttcggacatcatgagagcttctttcgacgggttcttattggtcctccttgcaggtggaccatcgcgtggcttcacaattcaagactctgctgccgtagaagaggatttcaagtttctatgcgatcttttctggtcaaacggagacggattgcctttggatttgatcgagaaggtttcgacgactgtcaagagtatacttccgctgctgcgcacggatacagattctttgattgaacggtttaaagcagtgtgtctggagaatcatggttctgacagagggaagcttccgttaccgccgacttctggtccgtggagtccgacagaaccaaacacacttttaagagtattgtgttaccgttacgatgaacctgcgactnagnttcnnnnnaagacctannncttgccgaggaagctaacctgagagtgacctacttactacattggtacaaaacccggtttagtttgaaatgtggaatatattttggttaaag

SEQ ID NO: 37 - DNA, 745 bp, Arabidopsis thaliana
ctcaagaggaagtacagaaatcggctgatgtcgctgctgctccggtggtgaaggagaaacctattaccgataaggaggttactattcctacccctgtggcagagaaagaggaagttgctgctcctgtctctgatgagaaggcggttccagagaaggaggtgactccggagaaggaagccccagcggcggaagcggagaaatctgtttcggtgaaggaggaagagacggttgttgtagctgagaaggttgttgttttaactgctgaggaagttcagaagaaggcacttgaggagtttaaggagcttgtaagggaggctttgaacaaacgtgaattcactgctccggtgacgccggttaaggaagagaaaacagaggagaagaaaacagaggaggaaactaaagaggaagagaaaacagaggagaagaaagaagagacaacgactgaggttaaggttgaagaagagaaaccggcggttccagcggcggaggaggagaaatcatcagaggctgctccggttgagaccaaatctgaggagaaacctgaagagaaagcagaggtaacaaccgagaaagcatccagtgccgaagaagatggaaccaagaccgtggaagcaatcgaagaatctatcgtctctgtttcaccacctgaatccgccgtagcacctgtcgtggtagagactgtcgccgttgctgaggcagagccagtggagccggaagaagtctcgatctggggagttccactact

SEQ ID NO: 38 - DNA, 745 bp, Arabidopsis thaliana
ttttttttttttttttttagtataagtaataaatacaataagatttacacaattttacaaataaaagtaggaacaaaaaaaagttaaaggtaagaaatcatgaaacaaagtgttctttactttcttttgaattttaatcacatattctccacacacgaaaacaacccccaataccaaaacaaagcaaaaacacaaccacatcttgagatttcaaaattacataataaataacaaactaaattaattaattaaaatttgtttcccccaaataacaaaataacattttttttgcttcttccttggatttggatttcaaagatcagaccttttattgagttttgaacctgtagagcactttcttcttcttggaagtctggttgtcgattgtgatcacaatctttcccggttcacccaccttaaaagaatcggttatcaccggttcatcggttgatccaatcttccgtgtcttagagacgatcacagcatagcttccttcggtggttggctcaaactgagctccgtagctcacatcagcacccaaaaccctaagctcccatgaaagcgtgcaagcctcagaagcaggcaattcaatagtgtagtttgctgccggtttaacgatggcttccgttatggtttcttcggtcaaaggagtatctttgctaagtccaccgtatttaacgggaacttgttcaggagctatgtatttgaaaatagtatcggcagatttggatggaccagcaaggac

SEQ ID NO: 39 - DNA, 744 bp, Arabidopsis thaliana
aaacagtttatcttgtcgacaagttaaccgccgataaccgggtctaccacaaagcttgtttccgatgtcaccattgcaaaggaactctcaagcttagcaattacaactcctttgaaggagttctctactgcagaccacatttcgatcaaaacttcaagagaactggaagtcttgagaaaagcttcgaagggacaccaaagattgggaaacctgataggcctttggagggagagagacctgctggaaccaaagtttcgaatatgtttggtggaacacgagagaaatgcgttggttgcgacaaaaccgtgtatccaattgagaaggtatcggtgaatggaacattgtaccacaagagctgcttcaagtgtacacatggaggctgcacgataagcccttcgaattacatagctcacgagggtaagctatattgcaagcatcatcatattcagctgatcaaggagaaaggaaacttgagccagctcgaaggaggaggagagaatgccgccaaggacaaagtcgtcgctgcttaaagaaacaattcaatctctctgggatgattttgactatcgaagaatcaaaagagtcactacttctccatcgatcgataacatatattggttttgtttcttcctacgtttgtgtttttctttttggtctttaatatgttttttttttttgggacctttgttcactcttttattgggtttcttgaaatgaaactagagaaacaaagaaaaaaaaaaa

SEQ ID NO: 40 - DNA, 744 bp, Arabidopsis thaliana
tcgagcggccgcccgggcaggtaaaaaaagaagaccacatgtttcaagaggagaagagaaagacaaactatggagcaattggcttggcttgcttcatttcttgtttctttgcattccaattcatgaaaatcgtaacaacacaaccttcaacaacaacaacatcatccattgccgttatcgatagcccaatgtcctcccataagctatctgataggagagaaatatggagagttatcccaccatctacctattgtctcaaaatcgaatctttcataaaattcgccacttctccaaacgccgagaagtacgaatcccgtccttttgaatccggtggatacaactggacacttattgtctatcctaaaggaaacattaaggaaggagctccacttaattacgtttcaatgtacgtccaaatagacaattcaacactccttaactctccaaaagaagtttacgcagaagtcaaattcttcatttataaccggaaagaggacaagtacttaacatatcaagagacggatgcaaaacgcttttttctgttcaaaccatattggggatatggtaatgttagagcctacgccgacgtggctaatcccaatgctggttggcttttcgacggtgaaaatgttttattcggtgtggacgtatttgtcactgaagtttttaacaaatgggaagtgttctccttcactaagagtttgcatgaccgcctttacaaatggacgttacccaatttctcgt

SEQ ID NO: 41 - DNA, 744 bp, Arabidopsis thaliana
cttttttttttttttttccaaaaagttttgagtcttctttaaacgaatggaacaagagtttagactcatctaaagaagagagaatcgcagcagagtagccaaacagagaagtacagacagacaaaatggtcccaaaacagacaaagaaggaggaccctataattgcataatgagatctaacaaaacaagagcacaacacagactctgtatggtcttcacttgagagggatgaacctggaggagtgggtagcaccaacgccaggcctaccgtgcttaactggcttgtacgagatggagaactctgcaaggtaatgtccaatcatctcaggcttgatctccacttggttgaaagtctttccattgtacacaccaatgatgcttccaatcatttcaggcacaatgatcatgttcctcaagtgggttctcactggttctggcttctcaccagctggtgcctctcttttcgccttgcggagtttcttaatcaaagccataggctttctcgtcaatcctctagagaaccttctgcgaatacgggaagagaagagcttgacaagatcatcggtagacatgtcgagaagagcatcgagatcgactcctttgaaggcgaatttcttgaacgttctcttctttggaactcctgctgctgcaacctctggttccacatcagccattgttggatctcggcgaaagataaggtggataaactctaaatctgtggtagcttgtacctcggccgcgacc

SEQ ID NO: 42 - DNA, 743 bp, Arabidopsis thaliana
  misc_feature (1)...(743): n = A,T,C or G
tgcctttatagatcttgggatgactcaactatcacatatattagaatccgatgaacacgacacgatattgtataattttacagtcacctagtacaataaagcagataagtcgcactgtaaacaaaaaaaaaaagagtacattcatggcatatcttattgcatcatcacggcaggaatcggaacacctggtctagcggtccatcccttgcgtgatctgtaagcatcgatggcttgtaatcgcagcctctcctgggaagcacttagagtagactttcttgccttcggaacaacagccaacttaagtggagcttgcacaacatcaccaaatcttatctgttcatgcttggggaagttttcacggagggtatcttcagtctttcctttattcttcttttgcttcttggcctcccaatacttcttcttgcgttctttccttttagaccgaccatcaatctctgcaagttcgttttcaaaacgaagatccgtcatttgatttctcttcctctttttcttcttcttctccaccacactatcatctccatcactctccgttgcaggaacaactacttcagctttcttaagcttttccnncttctctacgacttgtttagtagaatcatggggagaaggagaagtgtagttcatgaggatacggagcgtagaaggaacatcatcttgcttcgaacgatcaggcggcggcggaagtctcgccggtccgccgtgagcagctaggtaatttttct

SEQ ID NO: 43 - DNA, 743 bp, Arabidopsis thaliana
gctggaccaatctcaccggtccggttcctgagtttctgagtcagctcaagaatcttgagtacattgacctttccttcaatgacctctctggttccatacctagttccctctcttcattacgtaaactcgagtatcttgaacttagtaggaacaagcttacaggtccgataccagagtcatttgggacgttttcaggaaaggtccctagtcttttcctatcacacaaccagctctctggtactataccaaagtcactaggcaatcccgacttttaccgcatcgatttatctcggaacaagcttcaaggcgatgcttcaatcttgtttggagctaaaaaaacaacatggatcgttgatatatcaagaaacatgttccagttcgatctctccaaggttaagctcgctaagacacttaataacttggacatgaatcacaatggcatcacagggagtattccggctgagtggagcaaagcttattttcagttactgaatgttagctataacagactgtgtggacgcatccccaaaggagagtatattcaaagatttgattcttattcctttttccacaacaagtgtttatgtggtgcacctcttcctagttgcaagtgaagattccagcaaaaccaagcattatctctgatataccaaataattaatcaagtctagtgacaattgtgtttttattttgaatgattaataaaagcatgaaccaatgttttagcttgaaaaaaaaaaaaa

SEQ ID NO: 44 - DNA, 743 bp, Arabidopsis thaliana
ccacgcgtccgacaacgaagatcattaatggctctcgaggcatggtttatggatgatagcaatgaagaccagagacttcctcatcatcgtaacccgaaagagctcgtcccgttggattacttggcagagttgggagtgttgtactggaagttgaaccctgagaactacgagaatgattctgaacttatcaagattagagaagacaggggttacgattacatggatttgctggatctgtgtcccgagaaagtcagcaactacgaagagaagctgaagaactttttcacagaacacattcacaaggatgaagagattcggtactgcctagcaggaagtggctactttgatgttagggacaaggatgatcgttggattcgtatctggatgcaacctggcgatctcattgtccttcctgccgggatctaccaccggttcacactcgacaccagcaactacatcaagctaatgaggctgttcgtgggggaaccggtttggacaccatataaccggccacaggaagaacatccggttaggcaaaagtatatccacggcttaacctacaagtttggagaaaccgttaaagcacattaacaatattaatatatgcttgttgtgtaatttgtatgtattgtttactctttagtcttaagcagtaaaataaaaacagcggctccttctggatagttgttcttgtaacatacttttgcgatgtatgcttttatacataaaaaaaatagtgtgta

SEQ ID NO: 45 - DNA, 743 bp, Arabidopsis thaliana
ggtacataagtccccacacaaaactcgcccagtagcttcgtgagccttttcattaactccttaaaatccgtttcatcactatatttccgtcccaaagcaactctagatatcacatcgttagttaaactccccaagagctcgcttagattcacttgcaaagaacttgatttctggatcttctccatcatcagactgatctcttcttgtctcacgtttcgaaaggatctgaccattttgttggtgaggagatggaggacgcacacgctcttcatttgcctccaatactctccataaggagctaaggccacatcacgggcctcataaaatattttctcaaagatttttgaccgtggccggcttgcaaaaacgcggtcatacgtcttcaaaatatctcgagccacatctgcggaagagactacaagaacggggacaaggccaaagcgaaggagcataagagggccgtaacgattgctgagagagcatagtgatcggtgagggtggcgaccgagttgatgaaggtttcctatcaacggaagtctcggtggtgacgcaggtgtgttgcttttcttcccttttttctgttttatgaaaaagaggatggtaatgaagattatcaagcttagcagaattatcctgatcattgattccatgcttgtattcttcaagtttcgtcaagattttctagtaaagagtttctaagaattttgtggtcttctttttgaacttagatgatctcggacgcg

SEQ ID NO: 46 - DNA, 743 bp, Arabidopsis thaliana
ttttagtaaacattaaaatatttagattcacaaatataaaaaaaaacactacatattatttcttaagtaaattaaccatgctattcgtttcagttctattttccatcaatcgagggtagatagattactttgaaaaagtaataagaaaaacatgaaggacagaaaagatttaagacgaaatgttcttcataaacattttgagaacactttatttcataaaacatatttttggttgccacatatatcgagacaacgttatgttacatagagctgacaaagtcaacgatttcgaccacatcatgtagcagcgagttggagttaaccaccctacaattctgtctgatttgtccttgagttccagtgagaggtgtaatgtttcccattctattcattgcttccacaaaagcattgaagaatttttgagtgccatcagcgtattctctcaccaaggggattgtgtcagtggcattagggctggaaaacaactcttgatccgtctggataagtccctttagctctttcagattcacatagtatttattgtcaaaaaccgtcggtgtgcgtagatcgaaatcaactaagacggtctggttaccattgcggggacattgtccacgaagtgtctggaggtatgtagtattaagagtagggtcgggtaaaccagtgttgctaaagttgtatagtctatccataataaattggcactggtttttaccaaatgtgtgaccaccagagagtgcaac

SEQ ID NO: 47 - DNA, 743 bp, Arabidopsis thaliana
cttttttttttttttttttttttttttttttttcagatctaaatctcaaccatgtatgaatgaaaagagatccgattgaagttagactgatgatgattgatcacatttaagaagaaaagagtacctaatttccatagttattcttattcccgaaatccagatctgaaatctggaaaactccctaggtcgaaggaggagcggcggatccattgctgttgaggagagaagacgacgtcatcatcttctgaaactcttcgaaattaacattcccatcgccgtcagcatccacaggtccgatcatacgagtacagtcttcaacagagcaagacatcccgagacggttaagcacctggtgaagctcagaggcggagatcagtccgtttttgtcctgatcgtagagatcgaaagcgtcacggatctctgcggcggaggaagacgagcgacagagagttgagaattcgtcgaggttgatgtaaccgtcgcgatctgtatcgacttcttcgagcacgcggttgagttccgtctctgtgtaggaagtccccatagccttaaacacaccgccgagttcgaggactgagatcttgccgtcgccgttggagtcaaactggtcgaaaactttcttaagctcctctggattagccatgtccaccgttgcaggcgtgggtttggcggtttctggattcgcgcttgccattttttttttgttaaaggtaaagttggagagagacctgcccgggcggccg

SEQ ID NO: 48 - DNA, 743 bp, Arabidopsis thaliana
ctttttttttttttttttttttttttttttttttttttttttttttttttttttttttttttttttttaatgaaaatgatagttataaacgagataaaaagatctgtttcataaaatatctggagattctacagaaattgtagctaagacacatgaagagaaactcaaatacggaagcaacaactgcaaaacactgggaagatagaactaatagcctcccttgagatcgttgacgacatcgtacgggattggagtgacagtctccaaggtcattccttcgaccatgaatcctggtttgggtcctttaggctgtctcttggtgctgatggtctcaccattggctttggctgcagccttgagctcatcattcttcttcttcctcagcttgaactcctcagcacatcttgattgctgcacatgctccacacgcacatgaatcctcttccttatgatcctgttgccaatctgtttgttgacttcaacaccgacggcgcgtttagtgacgttccagatacgaccagtacgaccgtggtagaacttgtgaggcatacccttgtggatcgcaccattcaccttcacatcgacgtaatcgccgaccttgaaggttctcaggtaagtcgagagtggaatgtaacccttcttcctgaatggcctcgcgaacagatccctcgttctcgcccgaactccatgacccgctggcatttttcctcctcgtgcgacaactaaaaccctcggacgcgtgg

SEQ ID NO: 49 - DNA, 742 bp, Arabidopsis thaliana
  misc_feature (1)...(742): n = A,T,C or G
gcggccgcccgggcaggtgattcggcagctcaagaaccggaaattgctataatcgtgggagattcttcttcttcttctcttcannnnnntntcaggtaacagaaaaatctactgaagatgtgccgagctgctctcacttggatctttcaatacaaataccttccanntcacttccattcggtaacggccgtaacccaaagggttcattgaagtccactccttcattcaaaagtggcactacatccncaccaagnggaatcttgcggaatttaagcttgaaaaagaaagttatttctcaacccgaaagcgagagaagctccttactatctcctggtctcatggaaaccgctaaaaagcctaatgctactggttccacaacttctccatattggaaaagatgcttatcgcttcctagtagacaagctgcaaaactgtctcctgtggtttctacacaactttcagctggggtgcctggtgacccgcctaataaagattattcaaggtccttgtccatgcccggaagaaacaaagttattgtgcgatccatatcttttgacaaccacaaagcccgtgtttccagtgaaacaagtgcagatcaagtctcttccgttcctcctgaagaaactgatgaagaaattcccgaagaagaagccgtgtgcaggatctgtctggacgtgtgcgaagaaggaaatactttgaaaatggaatgcagctgcaaaggtgatctcagacttgttcatga

SEQ ID NO: 50 - DNA, 742 bp, Arabidopsis thaliana
aatttggaatcttttgtaaaaacccagatcagcggatctcgaatggcgaagcacacggcagcgttgaaggtgggactagctttactggccctcagcatgattggctacatacttggtccaccgctctactggcacctcacggaagccttagccgtttcagccacttcttgctctgcttgcgtctgtgattgctcttcgttgcctcttctcaccatcccaactggactcagcaatggttcattcactgattgtgcaaagcgtgatccagaggtgaacgaagacacagagaagaactacgctgaacttttaacagaggaactgaagcagcgtgaagcagcatcgatggagaaacacaaacgagtagacacgggtctgctagaggccaagaagataacatcatcttaccaaaaggaggcagataagtgtaactcgggtatggagacttgtgaagaagcaagagagaaggcggagaaagcacttgtggagcagaagaagctgacttctatgtgggaacagagagctcgtcagaaaggatacaaagatggagccaccaagtcaactgttaaatccaaaagcggcactgaggttgcttaaggacacaccaaaggttttgatttcttatcacacgaaagaaaagtttcagtgtatctgtgaatttgattcatactattgtatttaagttttctgatggagataaatcaatcagatggaatgaaaacatgtaaccaaaacaacaaaaaaa

SEQ ID NO: 51 - DNA, 742 bp, Arabidopsis thaliana
cggccgcccgggcaggtcttgtttccaatcaaatcctctaaagtttcgttctttgttctaagttttctgaaggagtgatatttgtttgtggtgtggttagagaaatgaatcggagacagcaagtgaaacgtagagtaggtaaatatgaagttggaagaacaattggagaaggaacgtttgctaaagttaagtttgctagaaactctgaaactggagaacctgttgctctcaagattcttgataaagagaaagttctcaagcataaaatggctgaacagattagaagagagatagctactatgaagttgataaaacatccaaatgttgttcaattatatgaggtgatggcaagtaagacgaaaatatttatcatcttggagtatgttacaggaggagaactctttgataagattgtaaatgatgggcggatgaaagaagatgaggcgcggagatatttccaacagcttatacatgctgtggactactgtcatagcagaggggtctaccatagagacctcaagcctgaaaatttactattggactcctatggaaacctcaagatctcagattttggattaagtgctttgtcccaacaagtcagggatgatggactcttgcatacatcgtgtggaacaccaaactacgttgctcctgaggttctcaatgatagaggctatgatggagcaacagctgacatgtggtcatgcggtgttgtacctcggccgcgaccggcgcgccggat

SEQ ID NO: 52 - DNA, 742 bp, Arabidopsis thaliana
  misc_feature (1)...(742): n = A,T,C or G
tttgatcataagaatatataattcaagcaagcaaattaatttatagaggaaattcacatggataataagacaaataaacaaagaaaataaattatccacacaaagacaatcaatatttttttagaaaaatgtaccatgaagaaaattcaagccttttgtggcgcagcnncggagtttccggagccttggccggagtttcaaccaccggagtttcgggagccttagtcgaaggagtttcagccaccggaacagcggcaacaacttcttttttctcctcctccacaggtttcttctcttccacggcaggcttcttctcctcttccacagctggcttcttctcttccaccggcgccgtcttcttctcctcttctacggctggcttcttctcctccgcagctgcgaggaccggaacctccaccggtttagcctcttctttcttctcttcaactatttctatctctttctcgccggttgcaattatttcctccggtttagtttctccttccttggccggttcttcggttttcacgacgacctcctccacgacttccacctctcgtggcttctcctcctcaacaacttccttttttgctggactcttctcgaacaatttcttcatccttggaacaaccttcgacttccaataacccatcttttaaaaaattaacctgaggctcttcttcgtatggaatagactttgtttttcttaattctctcactaattactttttacggacgcgtg

SEQ ID NO: 53 - DNA, 742 bp, Arabidopsis thaliana
ccacgcgtccggagagataaaccctacacaaaccgtcacacaccggcgcgaatttcgaaacgccggcgaccatgggcgccttcgtcatcggagcacgatgagattatcgacaaaccgatcaccaaatctccgccgccaccggcgttggtagttatgggacttcccgccaactgttcagttctggagctaaaatctcgattcgagatctacggttcaatctcccgaatccgaatcgataaagacggaattggctccgtttcgtatcgaaccgccgagtcagcagaagccgccattgctggtagtcacgagccttctttcggtatctccatcgattccaaaaagttggaggtggtttgggcgacggatccattggtgaagtggaaggaaggtgtgacggcgggagaaggaaaggagagaacgtcgtcgttttcgtcgaagcttttacgacctgtgatgcctttgagaaaacatgggagaagcagtaggttagcgtcagctattgttaatccgagaagtgataatactaaaggaattagtggagatggagggatatcatctccggcgacgacaagtgaagttaaacagagaaatatagtaacctacgacgatatcgtttaacaccattctactacaattatagtaactttgattcttttacatattttggcaattttatgagtttagctaatcctgttggtaatctcagttgtcgaatgttgtgaaatgagttgagttttgttta

SEQ ID NO: 54 - DNA, 742 bp, Arabidopsis thaliana
agtgttgctgatcattggtaagtttctacttcgtttgacacaaagtgtaatcattttgctttgatgttcatttgtttacttttaggtatccgaatgatctatccaaaagagccaagattcactcagttttggattggcatcacaccaatttacgtcgtggtgcagctggatatgttctgaatagtgtactaggtccagctctcggtcttcctctgaatccgaaagcagctgctgaagctgagcagttactaacaaagtctctgtccactctagagactttttggcttaagggcaatgctaaattcttgctcggaagcaaccaaccatctatagctgatctcagccttgtatgcgaacttatgcagctgcaggttttggatgacaaagatcgtcttagattgctcagcactcataagaaagttgaacaatggattgagaatacgaaaaaagcaacaatgcctcactttgatgagacccatgagatccttttcaaagtcaaagaaggattccagaagcggcgagagatgggaaccttatctaaaccgggtcttcaatccaagatctaagaacttagaacaaaactttggcaaaaccggtttcaggggtcagtcactggttcgttgaagaaaagccgattatctcctattctccattgtaagaaaaataaggaatgtaataatcacttgttttttgaactatatgtaataatcactttatcaaaggtttttaccgaacccgagca

SEQ ID NO: 55 - DNA, 741 bp, Arabidopsis thaliana
accaaagctataactcttagtttatacccagattgggcgacattagaaagaaattacaaatttgaatcaaagtctctgacataaaatttcaaactgaaagtcacttgtcacaatggtccttattaaagctactggatagcttggtttgatttgatattgataaatgataactagcaatcgaaaagagatctgtattgggaagcctcgtcagccatctcctgaatgctcctatcaacccggtctttatctagatcaagcttctgcttcagttccttctccttctcatcaagagcatcatagatttcatcattcttctcaaagtcaccacctttacgaggcaagatatgaatgtgtacatggggaacagtctgtcccgcttgagggccatcttggatggctaatgtgagagaagacgcattatggaaggtctcaagcttagagccaaccttctgagcagtaagccacaggtcactggtctcatcagctgtaagatcagtaaatcgtggcacaaggcgtctcgggcagacaagaacatgaccaggaagaagcggacggagattaaccatggcataagagagaggcgttgcgtagaacacttcacggggatcgattttgtacggcccaaatgcgtacgaagaacaagtagacgacatctttctctgacaacgaatactagataagatcgtcttcccggttacttgcaggttcagcatctcagctccgcctccgtcgccatgaaag

SEQ ID NO: 56 - DNA, 741 bp, Arabidopsis thaliana
  misc_feature (1)...(741): n = A,T,C or G
gaatgcacaacagagtcagcaagtttcagggagtccgagttggtggtcgcagtcaaaggcaggtagtagtaccgagcaggatgataaagggaagggatctcctgtagaaggggtggttcagccaggtgcattggtcactcttccgccgccaagagaagttgctaggccagaggttcagaggcagattatacctacaggaaaccttgatgaggaagagtgggtcactgtctatggattttctccaggtgatacaaatttagtactacgggagtttgaaaaatgtggtatggtcttgaaacatgttcctggtccaagaaatgccaactggatgcacatcctctaccagaaccggtctgatgcacataaggcgctgaacaaagcagggatgatgataaacggagttgtaatagtaggagtgaagccagtagacccaatacaganncaagcgttaaacgagagactcaacaaccaagganncatgcctttacctccaccatcatccactagaaacactgctcgacccctgtctcgtcctcagtacttgcaaaacggcagcgctnnctctnnncaaccaagtggtggcgctatggcctctccgnnnaagtcaatggtctcaaagttctttgacttgatgttcggtgtttaaaagctacttcaatggcatttcccgaatgattcttctttacacatagtttgaagtttttgagagcagagtggctaagtaaatcttagagcgtggtc

SEQ ID NO: 57 - DNA, 741 bp, Arabidopsis thaliana
acaaaaaaatgtcagtagcttcaccgattcaatgtatcaggattctaaatccatcatcttcatcttcttcttcgacagcttcgtcgtcttttagattctcaacaacgactaagccatgtgtcttcatcatcagatgctctcagacagaaggtcctttaagaagaccatcggctcctcctactctccgggagcctcaaaaacctgttcctccatcacagccatcttcctctcctcctccttctccgccgccgcagaaagctgtagctgttgatgggaagagtgtaactacagtggagtttcagagacaaaaggctaaagagcttcaagagtactttaaacagaaaaagcttgaagctgctggtcaaggtcccttttttggtttccaacccaaaaatgagatctccaatggaaggtgggctatgtttggtttcgcagttggtatgctcacagagtatgcaacaggatcagaccttgttgatcaagttaagatccttctctcaaatttcggcattctagacttggaataataagagtgttgttgttatatatagacagatccttttctctcttctcttcgattcctcttcttgttgtttcttcttcttcttcctgtatatgtatctatataatacagggccatttgtgtattcaatcacttttatcttcaaatggtataaatacgatcttgtatcattgattctagaattgcatacaaaagatgttttgaggattaaaaaaaaa

SEQ ID NO: 58 - DNA, 741 bp, Arabidopsis thaliana
caaaagctctccgatcagtttctccggcttaggaaattaattgaaggaaggtgatgagaggtactactgagaatacggatctgttcgatcccaaaacccaaatggatcctgacttcactcgtcatggttcttcctccgacggcgattttggattcgcttttaacgacagtaacttctctgatcgtttgcttcggatcgagatcatgggtggaccttcggattctcggtctgaagttgaagggtgtacgagtatcgctgattgggctcgtcatcgcaagagaagaagagaagatatcaagaaggaatctggtgtcacgatttcagacattgtggcatgtcctgaggagcagattttaactgatgaacaacctgacatggatggatgtcctggtggtgagaatcctgatgatgaaggaggagaggcaatggttgaagaagctttatcaggtgatgaagaggaaacgtctagtgagccaaactggggaatggattgttctacagttgttagggttaaagaacttcatattagttctcctattttagctgccaaaagccctttcttttacaagttgttctccaatggaatgagggaatctgagcaaaggcatgtcacccttaggattaatgcatcagaggaagctgctttgatggagcttttaaactttatgtatagcaatgcggtatctgtcaccacagcacctgccttattagatgtgttgatggctgctgataagtttgaag

SEQ ID NO: 59 - DNA, 740 bp, Arabidopsis thaliana
cgttggtgcgtccaccgtcgatagagaattcgccgcaaacgcaatcacgggagacgggaaagtcttcacgggaacatcactgtacgcaggcgaatctctaccggattctcaactttctctggtatattccggcgattgcggaagcagattgtgttaccctgggaaattgaattcatcattggttgaaggcaaaatcgtgctctgtgacagaggaggcaacgcaagagttgagaaaggaagtgcagtcaagctagccggtggtgctggtatgattctggcgaacacagctgaaagcggtgaagaattaaccgccgattcgcatctcgtcccggcgacaatggttggagctaaagctggagatcaaatccgcgactacatcaaaacatcagactctcccactgcaaaaatcagtttcctaggcactttgatcggaccatctcctccttctcccagagtcgccgctttctccagccgtggaccgaatcacttgacaccggttattcttaaaccggacgtgattgctcctggagtcaacattttagccggttggaccgggatggttggtcctaccgatttagatatcgatccaagacgggttcaattcaacatcatctccggtacatcgatgtcgtgcccacacgttagtggactcgccgctctcctccgtaaagctcatcccgattggtcacctgcagcaatcaaatccgcccttgtaaccaccgcttacgatgtcgaaaact

SEQ ID NO: 60 - DNA, 740 bp, Arabidopsis thaliana
ctcgggttgatgctgcgttaactagaaagaaagttgacatccaggaagcccttaaaaaccctccctgcatacagaagactcttaggatctacgttttcaactcgtttgctaaccaaaacaacacgatccctgggaatcctaatgctgacccgccaacatggactcttaaaattattggtaggatactggaagatggggtggatcccgaccagccagggtttgttcagaaagcaaacccattgcatcccaaattctcgtctttcttcaaaagggttacagtttccctggatcagaggctgtatcctgagaacccattgatcatatgggagaatgctcgatcacctgctcctcaggaaggatttgagataaagaggaaagggaatcaggagtttgctgctagtatacggttggagatgaactacgtccctgaaaagttcaagctttctactgcattgatggatgttctcgggattgaggttgaaacccgcccaagaatcatcgctgcaatttggcattacgttaaggcgaggaaactgcagaacccaaatgacccctctttcttcaactgtgatgctgcacttcagaaagtttttggagaagaaaagttgaaattcactatggtctctcagaaaatatctcatcacttgtcgcctccaccacctattcacttagaacacaaaatcaagctctcaggaaataatccggccgtatcagcatgttacgatgtgctagtggatgta

SEQ ID NO: 61 - DNA, 740 bp, Arabidopsis thaliana
ctttttttttttttttaaggcaaaatatgtatctgcattacaatttttatacagagtttttttacaaacaacactcatggtggtatataacaccgaagcaaaagtccgcttagaacactcaacgacaaaagtacaaacatataagagaagagaagtcttgtcttcttcattatttgatttcacatagaagaaaaagcaaaagctaaacaccaaactgcacattttctcataccgggatttactcacgaggagcgttcttcttgaatagcgcataagcatcgctgtaaatggcgattgcattggacaataccgcaagaacaatcatgaaaatagctaaggttgtgtccctgtttgttgctttgtcatgacgatcctttagtatgatagaagctgggaagatgaagccgagacaaacagcggcggttgctccagtgaattggaaagcatcccaaatgcttgggatgaagtttgcacccaagaagattacagagatgagaccggcagtgaggcaaccgaacctcacatttgaggtagataatgatcgagcggaagggaacaagagcccgtcaatgttaatccgaagagggtagaaaacaatcgggaacacgagcatcaaatgaagcgcgtagctaactcgaaccgcatcattaaggatagaaccaaaagggattccaagatcagtgtcaaagtttgcaaggacatcatcaagagtatcatcaccaaacaagaggaacccgaaa

SEQ ID NO: 62 - DNA, 739 bp, Arabidopsis thaliana
  misc_feature (1)...(739): n = A,T,C or G
tcaactgttttattattgataaacttttacaagcccaacaagccagtccaattacaacaaaagcttacaaagaagcccaagcaaaaaaccaaagaagaagatatgcttcaaaggacgtgtctaacgatacgtatgaggacacgtgttatcccaccaacctccatcnnncaaagagctcaactccggtcaattgatcatcgccggaaaacttatcctaacaatgaaattttgtttttgctcacngggtaaaaannnacaaacatcaattaaccaattttaactagttgctataaattccagcaaacttgggtaaagataaattgattaaattgaagagtccataactgatggtctaccatattgaaactctaaaaaccatagaaccagcgacgaaaaggcaattaacatcagcataggaaaagaagctataatcaccaaacaaaggcataatcgaaaccatgaaccgtcttgagtttaagacaaagatgaagcggcagatccaacagagcaaactataggagaaaccgcacaggaaacaaaaacagtaaacatgaagaagcaaacggcaaagaagccgatacgaagccggccatcgctgctttgaaagccatcaataccggacgagagctggccaacatcactaaaggagtgaggagctgccagatgataagcccgcatactcgggacatgtaaaccggaaaaacctccggacggcaagaagttttatcaaccttctctc

SEQ ID NO: 63 - DNA, 739 bp, Arabidopsis thaliana
  misc_feature (1)...(739): n = A,T,C or G
gtcacaattctacagttctcatgctaaaccatattttttgctctctgttccttcaaaatcatttctttctcttctttgattccaaagatcacttctttgtctttgatttttgattttttttctctctggcgtgaaggaagaagctttatttcatggagtctctgctctctagttcttctcttgtttccgctgctggtgggttttgttggaagaagcagaatctaaagctccactctttatcagaaatccgagttctgcgttgtgattcgagtaaagttgtcgcaaaaccgaagtttaggaacaancnngttaggcctgatggtcaaggatcttcanngttgttgtatccaaaacataagtcgagatttcgggttaatgncactgcgggtcagcccgaggctttcgactcgaatagcaaacagaagtcttttagagactcgttagatgcgttttacaggtttnnnaggcctcatacagttattggcacagtgcttagcattttatctgtatctttcttagcagtagagaaggtttctgatatatctcctttacttttcactggcatcttggaggctgttgttgcagctctcatgatgaacatttacatagttgggctaaatcagttgtctgatgttgaaatagataaggttaacaagccctatcttccattggcatcaggagaatattctgttaacaccggcattgcaatagtagcttccttctccatcatgagtttctg

SEQ ID NO: 64 - DNA, 739 bp, Arabidopsis thaliana
caaaccattcttcacattatatattatatatacattcatcagtaaacaatcaagcataaacaaaaccatcttgatagacaatatattaatttgggttattaaacctaacaaaaaaagacaaagaaaatgagattttaaaacaaaaataagaacccaaataaaattacatatatataatggggtcaaacgaagccagaattgtcaggccaacgatagtatctttgacaaataagtagtgcaagaagaacttgacgatgaggtagactctaatgcttgtaacacgttattggtgcatggcctctcttgcggatcaatggccgtacatttcaaagccaagttcataacatggacaatctcgcgctgatgcactgatgtgtcaatggatgagtcgatccacgtgtcgatatggcaattcgaatacgaatatctagcccacttgaccaaacttccgttaactccagattcgatgtcctcattactggaggaacatttaccggtgaggagatgaaggaggaggattccaaaaccatagatgtcacttctacttgtcatctccttgtgctctctcgtttctggggccatgtaagcagcatccatgcaaagtaagcccggaagaccgagacaaagccttggttcatcggtgacgtcgatgacaatattctccggcgataaattaccggcaacaacagctggagaacaccggcaatgtaaaaaccgaagagcttcgacgattcccttc

SEQ ID NO: 65 - DNA, 739 bp, Arabidopsis thaliana
  misc_feature (1)...(739): n = A,T,C or G
gtcgcaagagtttcccattaacaaaaagctctgctgggaagtggaatcactcacaaagacggtctctgacagaggatgaagagttgacaactgatannngccattaccagagaagtcgccagctcaaacccaacaatttnnnggaaatgccatccattgactctctttagatagcttgtgatcgaaggnattgttgcaatgatgactgcacatgtgtatatgatggggatcagactcttcggcttgttcttgcgtagccacattaatgaacctagtgcagctagagatatcgtgaacaccagatttgcattggcttcaagcccttgcaaaacataatcccaagtgaactccagtcctcgagcaccaacccagagaggtgctaacctgtgcaaaacagaatccgcgaatgcccacccaagaccaacagcctgaaacttatgattctgggagatgttcctgtgtgttagctgggccagagcataatatagaccagcaacatctatgaatccaatcatcgctttcaatgcttcctggtatgggtcaaacacttcagtctcagatacttgcagaaaagtcgccaaacaaacaagcttaaccaatgcagtagcaaggtaaacaacagcagctttcacggaggttccaagtgtatcatattcagataagggagtggcggagtagtagacggcgtgaggaccgaatgtgagaatcgcacagttgaagaagtgaaaaagcgtcatct

SEQ ID NO: 66 - DNA, 739 bp, Arabidopsis thaliana
ccacgcgtccgctgagctccgaccaaaaattggggaacgacgatggcgacgactcttcagaaactctcctctcaaatccaccgactctctccattcaccagatctctaatcgttcgcacatccgcaacgtctgctccttctccgtctctgggatcgaagaaagtctctgaccgaatcgtcaagctttctgcgatcgatcccgatggatacaagcaggacatcattggactctctggccagactctccttcgtgcgctcactcacactggtctgatagatccagcatcgcatagattggatgacatcgaggcttgctcagcggagtgcgaggttcagatcgcagaggaatggctcgagaagctcccgccgcgtacttacgatgaggagtatgtgctgaagcgtagctctagatcccgtatcttgaacaagcactcgcgtcttggttgccaagttgtgttaacgcaggagcttcaaggtatggtcgtcgctgtccctgaagctaagccttgggatattccgtaagtttttgttcttgaggatctcataaatgttgggttcgttctcaatttggctaataaaattcgctttggaaatttcggtactctgaagataactccatttgaatctgtaattttcgtttgcttacatttaaattttgtaatgtggtaaagaactctgcttgtttaaacgattccctgcttcaagtatgggtgaatgttgttttcttgattaaaaaaaa

SEQ ID NO: 67 - DNA, 738 bp, Arabidopsis thaliana
  misc_feature (1)...(738): n = A,T,C or G
gtacaatatctattttcactgtaatataactatataagtttacaaccccgtacaagacattttacactcgaggatctccaatgttactattataaacacacaagattacacaatcacactgtgacagaagacataagagtcattggagccaaaaatctctattttttactgattcaaataatatctgaggtcttcggcgttgggtnggtntctgagtttagccattgctctccgttcgatcttccgaatccattctttgctaactttaagaagcttcccaatctcttccagggacttgggcctgtagtcttgaagaccataacgtaggaccatcacttgcttctctcttggctctaacccttctagaagatcatgtatgtctctcctcgcgctctgcctcatcacggcctcctcaggactctccatcgttgtgtctggtgtaaattccaggaattttgtagtaaagcaatccccaactttcttgtcaattgaaccgaccacttttaggcattggttagctgctcgaatcttcttcaccgagtggcctgttagttttgcaatctcctcatcagccgcatattttataccatggctcgttttcagggtcttacgagccttttgtatatgattgatagttcggattattgatgaaggaatatggacgcctcttgcatgccgtgacaccatcgtagacattgattttcttatccaatactgcacatatgttgaaaacttgta

SEQ ID NO: 68 - DNA, 738 bp, Arabidopsis thaliana
actaaatatcatttaaattatccatagtatttaatcaaataaattttggtacatcgaaatatgatgaaacgtaaattgatcctaacctaagagaaaatgcacaatcgttaatttatgagataataagtaattcagagttatctgaacaacatatacccatccgttaaaagtaaacgaatctatgaaacgataaaaagggggtcaacgaaacatcatcaattcatgatcatcaagaaactcataaccccaaacgcgatcaggcctgagatcttcaccacggtgaagctttttgtaacagccgctccaaactgctggtcaatgggatacaactctcctggtggacccgtcatgtatatgtaagtggacggaggcggtggacaataagacttcttcggcggtgaaggaggtagtggtggtggaggacaagcttgagacggcggtggaggtgatggcggtggaggtgacggaggaggaatgttttgaagacatggtgtacattttataggatcctcttcgagttttctattggttgatgaatctgaagcgttgatgatcattggaaacgtgagaaacaccactgtcgtcaagagcgtggcggcgagagcctttgtacggcgagttttctccggcatggtgagagttgttatatgcctggagaatcgaataaagagaggtttgggaagattctttggttggacgtaaaaagagttgaaaatttggtgaggtggtttggtaaga

SEQ ID NO: 69 - DNA, 738 bp, Arabidopsis thaliana
  misc_feature (1)...(738): n = A,T,C or G
ctgtttactgtttcgacactttggtctctcactacaacaatgaagagactccaccacctgcctttgaagaggccaatcatccattgtttgttacctggaagaaaatagtgaatggtggagagcctcggttgcgtggatgtattggtacactggaagcacgccgcttgatcagtggcttcaaggattatgccttgacaagtgccttgagggatcgcaggttcccacctatacaggccaaagaattgccatctctgcagtgtacggtgtctgtcttgactgattatgaagatgcnnnagattaccttgattgggaggttggtaagcatggtataatcattgagtttactgaacctgagactaatacaaagcgaagcgccacatatttgcctgaggtgccagctcatgaaggctggacaaagatagaggcaatcgattcgctggtgcgtaaagcaggatacaatggtgtaannncagaagcagtgcgtaggcgaatcaatctaacgcgttaccagagtacattattcagcatgcattatagcgaataccnnncatatgtgaaggcgaccaggggcgttgttggcccggttattaatgggatcaacaagcacgcctttgcctgatttgcacctgcaaatggatgccattgattatgtttggctacctcctaatttatcctctgtcttgttgtctggctctcataaaagaaacgagacttcgaacttggctgtttcactattg

SEQ ID NO: 70 - DNA, 738 bp, Arabidopsis thaliana
  misc_feature (1)...(738): n = A,T,C or G
tttttttttttttttttattgtgactaaaactttattttattatatataagaaaattaaatttaacttgacacatctttttttacaaagcatcaaactccaaacacgaataaagaaaaataaactttaaacaagaaaactcaattcaacttcctctcataagctcaaaccaaatttccttcttacttacttaagctgtatagagttttggatcggacaaccttggaacaggaatagccacaagtggagacttcaacttaagaacaagaccaaacttctcttcaacctcaaacttctgtccttgaggtgctttccaatcaaaagagtgaagaagtgaagcaatgttgaacagaacaagtctctcagccatgttaatcgccgcacaaatcctccttcctgacccaaaaggcaagtacttaaaatcacctccattgaaatcaagcgaattctccaaaaacctctcaggtttgaactcgtttggttcatcccaattcttaggatctctatgaatcgcccaaacgttgatgaaaatcttggagtctttaggcacagtgtatcccgcaaccaccgaggtttcgctgtttctgtgaggaacaagaagaggaagcgtagggtgaagcctaagagtctctttcataaccgcttgtaggtaannnngcttaggtaaatgtgattcctcnacgatgttgtctttgccaacaacttggtcaagttctagtcggatcttgtttaacacttc

SEQ ID NO: 71 - DNA, 738 bp, Arabidopsis thaliana
ctttttttttttttttgattaaagaaagtaaatttattcaccagactattattatatatacacaagggtacgttataagcatttatggaatgtaattagatttgaaccacaaagagacttttgacatgaaagttgatacttccttgtcattgtttctcttcacacagtggtagttttctgatgggaagaagaatcagagattggcattcttatctttgcagattccttcaacaaatcgaatgaagaaaaggaatgtggcgggagaacaacggtcatatcctcctctgccaactctagcaagctttcatgtggtacaaccttctctggctgtgagaaggaattttcatccatcacattggtagaggtaagtactgtcttctttgatcccgaaactctcatcacgttcgggtccaatccagttaccaacacttgcatattttctgagttagctccgaagtttacagcctttatgcgtatgtaatctttgccattgtttttccaagagatagcagatgcaacaagagaagtagagtttcccttgagtgttgaagtgagaagagttgctccgcttgactctgcaaaaaaccgttgaacccaatagctaggtgttccatatagatgagaggagttgaagactattgcatcagggttccaccgtctatcatttgtgttcacaaagagtggagcataacttgccatttcaacaatgtcactattcttttcaagaccaatgagaaa

SEQ ID NO: 72 - DNA, 738 bp, Arabidopsis thaliana
cttttttttttttttttgttgacgaaacttgagtttatttaacgaacatgctgctttcattatatgtttctagttctatagcgaaacacatacaggaaattcgctgagtgatcattacatgttctgaagaaagagagtcatggccagatgtctgagacgcagctaacagcttcactggatacattaccaagtccagggcttgagttctgtccagaaagtgtcattccagggaacaaagattggtcactgtggactgtaatggcgggcgaggtatttcccgtgtagtgcagactgctgatggagtgtgatggtggacttagatgagtttgtagaagttgattcaagctgctagtgagtgaccctctcgctaccaaatcttctgctagtttcaccttgactctcagagtttcaacatctgatttgagaactctgttatttgttccagcgctacgaaactgttgtgttgcgtctatgagctgcttgtacagtgttgagttatcgcctttcaaagaatcaacctgagtctcaagatctaccaagtactcttgcttccttctcctcgacctctttgctgattccctgtttgagttcatccttctaatacgtttcagatcattgggatcattagtcatttcagattgccctgcttctgtctcggcatcttcgtcatcagagttaacatgagaagatccacttgtggttctcctaactcctcctcttacctcaggtttattggct

SEQ ID NO: 73 - DNA, 737 bp, Arabidopsis thaliana
  misc_feature (1)...(737): n = A,T,C or G
caattctgttaaacaccgccgaagatcctaccttgattcacttactaggtgtaagagttgccatgatttgtattggagagatgagaagcactgtaagatttgccatgccacgtttgaggttgatatagatcttgaagaaagatatgcgattcatgcggccacatgtatgaggaaagaagagtgtgatacatttccggatcataaagttctatcttcccagttgcaatcactaaaagctgcagtatatgccattgagtctgctatgcctgaagatgccttgattggtgcatggagaaagtcagctcataggttatgggcgaaaagacttcggcgaagctcatctgtgtctgaaattacgcaggtgattggcgactttgttggggcaatcaatgaagaatggctatggcactgtagtgatcaagggcagactttaatgggagaaatcataaattgcttcccttcgatgcctcaaacaacttctgcgattgctctctggttggtaaaattggataccttgattgctccctatgtcgaaaaagctccacctgnaagggatcaaccgttgtgcaggaccannaatacaagtnnncgagcgtctaagcggtagttgtagctattatctggacatcaaggacggcgatagaataggggaagaagattgtatagaggaagaatgtttagttcctgcattcagtttgagataatttgagattggaaaattctacaatccaagtgac

SEQ ID NO: 74 - DNA, 737 bp, Arabidopsis thaliana
tttttgtctgtaaaaaggttttaagtaaagattccctggtacattttaaggcaaaataagttcaaagtcataataaactcgatacttttagacacgagacatgccgagtttgcgttcaaacaagcgacgcagaagataaacttggagaaaacttgccccaatcagtgcaaacgactcgaacaaagctttgtgtactgctcttttgctcatgttctcgttcacgatagcttgacgatcggtctgagcttctaaccaatgttgttcaaattggatgttgtaaagagcctcctctaactttgatatttgctccatcaagggagtgaaatgctcgtcctttgcgtgttgatcgtagtatgcaaagtgaccaagctgtacatcgaagtcaatggtttcatgataaggagacttgtttgtgaaacagaatctgtaaaccccttttttttggacaacaaaatcatgctttgcgcttatctgctccctgaagtcatgaatttgttcgcctgttgggccatgtatcacaagatctacaccatcctcgttaaaatgccattgagagtcagacttgatgacgacgaaagagacatgaagcgtatcaccttcatattcagccttgtgggagaaacattcttcacggtctatcacgaatctaatccctaacgtagcctggaagctccataagagccctagtaatacgatcgtacccttcaagctcatcttcttgagaagatcaaatctga

SEQ ID NO: 75 - DNA, 737 bp, Arabidopsis thaliana
tcctaagtttcagagggcatgacactcgccacaacttcatcagttttctctacaaagaactggttcgaaggagcattcgaaccttcaaagacgacaaagagctggagaatggccagaggatttcgtcggagctcaaacgcaccatcgaggtgtcaagattcgccgtcgttgttgtctcagagacctatgctgcgtcttcttggtgtctcgatgagctcgtaacgatcatggatttcgaaaaaaagggttccatcaccgtgatgcccatcttctacggcgtggaaccgaatcatgtgaggtggcagaccggagtactcgctgaacagtttaagaaacatgcgagtagagaagatcctgagaaagttcttaaatggaggcaagcattgaccaattttgcgcaactctccggcgattgttcaggtgatgatgactcgaagctggtggacaaaattgctaacgagatatcaaacaagaagacgatttatgcaacaatatgatgagtccagacgagaagaagaagaagaaaggagaaggcccataaggactcgcatgcccaatccaaagtattcccaacactaagtcattttacttagtctctgttttcgatttagttacaataagcaaggagtcttccacgattacagtttccatcttttccaagtttgtagaagttgttactccacgtttgtttccatgttgtttctagttgtaaggaggtgtactccaagtatttatat

SEQ ID NO: 76 - DNA, 737 bp, Arabidopsis thaliana
gaaaagctagctgcgtgcaaagaactcggggctgatgtttgtataaattacaaaaccgaggattttgttgcaaaggtaaaagcggaaaccgatgggaaaggagtggatgttatcttggactgcattggggcaccgtatttgcagaaaaatctcgacagcttaaactttgatggaaggttatgtattatcggtttaatgggaggagccaatgcagaaataaaactaagtagtctgcttccaaagcgtctcactgtcttaggagctgcattaagaccaagaagccctgaaaacaaagcagttgttgtaagggaagtcgagaagaatgtctggccagcgatagaagcagggaaggtaaaaccagtgatttacaagtatttaccattgtcacaagcagcagaaggtcatagccttatggagagtagcaaccatattggtaagattctccttgagacttgattctctgcaaagggagaaatgttcagagacaagagtcatggtcaataatcaataaaatctggtcgattctgttcatagatatctctttacaagagttctgtttgttggcttttatgtatctctgatttggtcaaaaagacactgtaactatggaacatatatagtatcaaataagctgttgtataccaaacattgatttcgaagtagaatatgattttgtaagaagtttttatttattttgggcttaaaaagtgtatttattttaaaaaaaaaaaaaaaag

SEQ ID NO: 77 - DNA, 737 bp, Arabidopsis thaliana
  misc_feature (1)...(737): n = A,T,C or G
ctaccgattcttttggattactggccaagtatgttcgggatgagggctagagttgcgttgcgagagnnnggtgttgagtttgaatacagagaggaagatttctcgaacaagagccctttactcctccagagtaatcccattcacaagaaaatcccggttctggtccacaacggtaaaccggtatgtgaatctcttaacgttgtccagtacgtcgacgaggcttggcccgagaagaacccgttcttcccttnngannnttacgggagnnnncaggctcgattctgggctgatttcgtggacaagaagttcaccgacgcccaattcaaggtatgggggaagaaaggtgaggaacaagaagcaggcaagaaggaatttattgaggcagtgaagattcttgaatctgagctaggagataaaccttactttggtggagatagctttgggtatgtagacatttccttgattacattctcgagttggttccaagcctatgagaagtttggtaactttagcatcgagtcagagagtccgaaactgatcgcttgggcaaagcggtgcatggagaaagagagtgtgtctaagtctctccctgactctgagaagattgttgcatatgctgctgagtataggaagaacaatctctgatttgaataatcttgttgttctcttgttgctaagctgtgttctgtttttgtctttgtttttttttttcccctaataatgcgagagagccttag

SEQ ID NO: 78 - DNA, 736 bp, Arabidopsis thaliana
tttttttacaatactaatttaagtaacttgacagttaaattagacatttatttgtagcaaatgagagagattaacattacattattcttgactaacaagttatacaccaaccctaaaaccccacaaagttagtctgtgtgcaattttcatctcctctgttccaacacagatgtttcctaaagcacacaactttacatcgaacacaactcatttcatggcatcactttgacccattcgtaacgtccaggcaatggattgtccgagacaatgtcaaagttgtacttttgaatgaagaatctctgttgttgctgttctgcgctagcaaagaagtcttcaatctcactttgtattgattttgaatcacttatcatgctcctgttttctgattccaaatcaaaacctttatctccaaaattacaatcagacctagatattctctcattatcaccacaagcttcttccgtcgtcgtatccggctctaatttcttcgccggaccggaactagccctagggtttttcgtttgacattgattgacactaggaatgagctgttgcttctgctgttttctggtattagtgagtaatggaagcttcacgagacggcggctccggagctggaggtagttaaaggagtctgcttcgtcggaatgagaacggagacggtggagggcgaggtttttagcggcggcggctctggtacggaaacctagagcgggtgggtgagatttatccttaa

SEQ ID NO: 79 - DNA, 736 bp, Arabidopsis thaliana
  misc_feature (1)...(736): n = A,T,C or G
aaaaagctagggagatcctctgaggcggatctggttgcatacgcagagtccggctctttggttgagtccacaaccatccaacgatcatcctctgattcaggtctgaccgagcttagcaaactaggagcagcaaagaaagctggcaaaaccaaaagaaaccgtctgtacagaacggaaatcgcactcgcgtttatcctcttggcagcctcggtgagaagcttgttgtctgcgcaagggatccatttctatttcctcttgttccaaggaatcacgttcgttattgtcggtctagatttgatcggggaacaggtcagttagtttatataaccctttttctcagtttaaaactacattgaaccataccacctgaagaacgaacaagaccaaaagatcaagtcaggaaggaacgaaccaactcactcgcaggtcttttcgttacagatagatacataaaaacaattcatttaaagtttctgtcttgggaacatgattttatactctacttgggttggtttagattcnnnnnnnttttacggatagtattagagaatgncagaaacaaccgtcggagaggattncaaagacttgcctacctgtctttgttgtggtattaagccaaannntggtttttttgttgtgcaaaaattgttgttagggtgttggttttttgtttcggatgatgtggcagaaacatattttaagctttgctctaatgccactctcaaattctttgtta

SEQ ID NO: 80 - DNA, 736 bp, Arabidopsis thaliana
ctttttttttttttttgggaatcaatctttttaataagtgtttaaatagacaaaagcagagaatcctaatgtaactacttacacacaagatttacatttggttcttttcttttcttgtcttttcgaatattcttgatcttaaatcaattttcttcctccaagttggtaggctcgcttagaacatacttaggtagctcatacttagcacctctctcgtcatagcagactgtgagatctgtgttctgaacaatgactcctgcactgtccacaattgcttgtgcaagagatatgtcagcttctgcagcagcgcgaagtgcgtcccatatctcttttctaccaccataatgaggagcagtgtcccaaaactcttctctaagtttcataagctcagctttcgtgatcggttgggtatgcttccacggtttcggcttcctaattttcttcactgacccatctgcttgagactgtgtcgatccagcacaacccatttatgttcttgcttcttctttcaaacccttaaagtaaaaaacacaaattctctcggaaataaaccaaaaggattcagacaaaaccctgtgtttgtcgaagcttcatcgaaaccaatcaaagtcgcaaacttttcttttccttaatagaaagcaaagagatttttttttacgaatcttcagacaaacaaattagatgtcggtagaaagacgaagatcaagaccgagttgaagatgacgcggacgcgtgg

SEQ ID NO: 81 - DNA, 735 bp, Arabidopsis thaliana
ttccgatctatccaaatcatagattcttttatcttcacaatctgttagtgtctcgtagctctaattaggtaataactaatgggagtgtcaaagaagaaatcaggtgagattagaggagatttaatcccagggttaccagaggaattagcaattgagtgtttggttagagttccttttcagtttcattcttccatcaaatctgtttgccgatcatggaaatgcgttatctccagtcgttcttttatcaaggaacggataggttttggtaaagctgaatctcttctctgccttgttcaacctctgacttcaccaccgtctccggcgatgattgaaggtggtgagatgagtcagaagaagaaagaggaagaagaaggcgagtctcagatgacgcagcagctgctacaaccgcgtattactggaacgccactttacggtttaagcgtttataacgcaacgctggacacgtggcaccgagtcgcgattcctgaacggattcctttgttctgcgaatgcgttgcgattcaggacgcggggaaagtgttgttaatcggcggttgggatccggagacgttgcagcctgtgcgagatgtttttgttctggatttctttgccggagaaggaagcggaagaaggttcagaagaggcaggccgatgtcggcggcgagatcgtttttcgcctgtgcttctgttggttcgacgaaggtttacgtcgccggaggacatgatgatcagaag

SEQ ID NO: 82 - DNA, 735 bp, Arabidopsis thaliana
  misc_feature (1)...(735): n = A,T,C or G
gaagcatcacgagagtggctgccaactgttgtgggtgaaataatgtctccaatgggtcctgctnctgttgaattcattgatcctagagagcctattgcggttgttccgatattaagagctggtcttgctcttgcggaacacgcatcctcagttttacctgctaataaaatttatcatttaggagtaagtagagatgagaaaacacttttaccatcggtgtatcttaacaagttgcctgatgaatttcccaagaattcaagagtatttttggtcgacccagtgcttgccacaggtggtaccataatggcggcgatggatctattgaaggaacgtggtttgtctgttcagcaaatcaaagtgatttgtgcgattgctgcacctcctgcactatcgaagcttaacgagaaattccccgggcttcatgtatatgctggaattattgatcctgaagtcaatgaaaaggggtacataatccctgggcttggagacgctggagaccgcagtttcgggacagaaacacattgggtgaagtgatacttgtatgagttgttaaactttaacagtcacaatcgttagattatatattgcgtctcttgtactttgtttttgatgtgtgatttcaggttcttgagagggtttcgataaagagtcaaaagttcacaaacaagaaaaactgaattcctcattattacaaaacagagaacaaacttgtcatccaaaaaaaaaaaaaaaaaa

SEQ ID NO: 83 - DNA, 735 bp, Arabidopsis thaliana
ctttttttttttttttttttttttacgaataaagcgaaatactattattggttcatataaagaagaacatgaaacaaatttctttatagtgtttacagttacagcttcgaatggacaaccaaatattggaaatggctaccatttacaaaatacaacgttccttccttattggttctcttaatcacaacattacacgtaaacatctctatatttttttaattattatttgtataagaagaaaaaaagattaaaggaaaaataaaggatttagagataaagaagtcaaattcacatgatggaacagctctgtggattctcttcgctgaagtaatcacatctagtgacgtggcattgtctataagcaggtggtggtggtgggcagcccccaccccagctctcgtagactggtcgtccatagcactcgtaaggctgcggcggcattccatatccattgaatgctggccctccgtatccatcgtagtagggcccgcaacacattgctggctgcccttgcggcatcatcgggatcgcttgcggtggcggtcccggctgcttcggggcaggtgcgggagctggagcgggagcgggtgcgggtttggctgcgggtgctggtgcgggagctggagcgggtgcgggttgcttcgtcttttcgggttctttgggcttttctggctgtttgggcttctctggctctttaggcttttcaggctgttttggcttttcaggttccttagg

SEQ ID NO: 84 - DNA, 734 bp, Arabidopsis thaliana
gtccgatgttactctttgtaaaattcgctgcatcgatcgtgctagattcatggagcgaagccaacagatcgcatctcgtggctaagcttatcttcctggaccaactctgtgagatctcaccatacctccctagaagctccctcgaatcacatgtcccgtacaccatcctcaggtcaatctacacccaatactactccaacacaccttccacaccgctctcaacagcatccccgtaccactccccatccgtatcgctcatccacgcttctccctccatgaaaaactccaccactccccagcgtggtagtggtagcggcagtagctctacagctgcccctgattcaggctacttcaaaggctcatcatcttcactatacggtcaggaacactacaccgaatccgaaactggaaactcaagaaacaatgagaacaacaacaacaacaaacaaaggggaagttctcgtcgttccggaccattggattacagctcgagccataaaggagggtcaggatcaaacagcacaggtcctagtcctcttcctaggtttgctgtctcaagatctggtcccatctcatataaacagcataactaagtaacaacactcccacattctacaaaagagacaaatttgtttctttttccccaaaagaaaaagacaattatgtagagagattagatttgtacaaatccctcgcaacagtcttcttgttatgtattggattgtaattcagaa

SEQ ID NO: 85 - DNA, 734 bp, Arabidopsis thaliana
caatgaaaatgaaatttataaatttttcattcaattaacttgggaccatatgaaaatttgcttcatgaattattagaattagaaaccaaaatcctcaaaagcctatttgggggatcatcaaccttctatcatcaccatggatccttacaagtatcgtccttcaagcgcgtacaacgccccattctacaccacaaacggtggtgctccagtctccaacaacatctcttccctcaccatcggagaaagaggtccggttcttcttgaggattatcatttgatcgagaaggttgctaatttcaccagagagaggatccctgagagagtggttcatgctagaggaatcagtgctaagggtttctttgaagtcacccatgacatttcaaacctcacttgtgctgattttctcagagcccctggtgttcaaactccggttattgtccgtttctccaccgttgtccacgaacgtgccagtcctgaaaccatgagggatattcgtggttttgctgtcaagttttacaccagagagggaaactttgatcttgttgggaacaacactccggtgttcttcatccgtgatgggattcagttcccggatgttgtccacgcgttgaaacctaacccgaaaacaaacatccaagagtactggaggattctggactacatgtcccacttgcctgagagtatgctcacatggtgctggatgtttgatgatgttggtattccacaagattaca

SEQ ID NO: 86 - DNA, 733 bp, Arabidopsis thaliana
  misc_feature (1)...(733): n = A,T,C or G
ttacaaatattagcacagagccaaacattgttaggaccattggtcctatacactttaatgatcaacacaaattgttttacttttacatcatacactaagctacaaaagaagaggctgtaaagcaaacgacgtctgtttccgttgttggtctgttgatttcattgttgtagtagtagctgtggcggttgttatgtggtcatggaggattaagagtttcagtgtggctgattcacgcagccaagttgctaccaccgaaccgcttgatgtgaaccgtcccatgttgcattttgacaggtggaatggtgcatccattcccctcaaaagaacttcaaccgctcgtcttagtgctccgtctccaaccactttgctgtgtttcccccagccagtcaatatactcaagactttaggtaactcatgaccttcatagacaatggagcgtatgtttagtagccacgcatggaccattgcacgtgcagctccagaagacatgaggtgtnnnnnnnnncnngaatcagaccacacgttttcccaaacttgcctagatcttccctcaagtgccaccagttctgcacctcgtttctggccaaagtgccaaagcatgtcagttagggcattgtagaaggcagaagcagtcgaaccatccatttcatttactttgtcaaataagctctgagcttggagccatacattctctctctggcccatgagaagtccatgaacaacaccatcggac

SEQ ID NO: 87 - DNA, 733 bp, Arabidopsis thaliana
  misc_feature (1)...(733): n = A,T,C or G
cgggcaggtaccctaaagaaaagcgtgaacatcaagaaaaacatggtgtctatatcaaaggagaagaagaaagagcancagcgggttttcactccatcagtgattgaaccatcgtttgggattggtcggatcatatattgtctgtatgagcattgtttcagcacaaggccaagcaaagcaggggatgagcagttgaacttgttccgtttccctcctcttgtagctcccatcaagtgcacggttttcccgcttgttcagaaccaacaattcgaggaagtagccaaagttatttccaaggaactcgcctctgtcggtatctcccataagattgacatcactggtacatcgatagggaagagatatgcgagaaccgatgagcttggagtgccatttgcaataacagtggactcggatacatcagtgacaatcagagaaagagacagcaaagatcaagtccgagtcaccttgaaggaggcagcttccgttgtgagctcagtctcagaggggaaaatgacgtggcaagacgtctgggcaaccttccctcaccattcttctgctgctgcagacgagtagctagctccttgtttttttccgaattaaaaaccaaagtgttaaattaattgttgctgaatctactcatttttaatgttttgtttcttagtgtcacgtaaaaagttcgataccagatttggagacgaagtggctataaagtataaactctctgttaaaaaaa

SEQ ID NO: 88 - DNA, 733 bp, Arabidopsis thaliana
ttggatcccgtaatcatttgtacaaaagcaagaggagttcatttgacagagtccaccctgacgaggtttctggtagaccaaggaaggaacttggcatttgagtttttcagatgcttcttttattctaccaaaggaacaattcacaatggcaacattataacaagctactttcccatctaattatccaagaaacatgtatggattatacagagcaaccaagatgtaacttctggtaccggaatttctatttctcgatcccgtgacagtgacagatagtcccccagtatcagattctaaactgttctcattcaaaataagccatttagggtattacaaagaaaatatataataatattacaagatttggagttatagtagcttttcctgtagtggtgataggctttctaagttttaggagtgttgtcttttttgtagataagaaagtaaaagttacaaatagagttttgccgtcttgctttgccggaggagctttcttagtcactggtaacttctcgatctgattttcaggtgcagtcttccggcaaagttcttaattaggctttggttcgtgtaagctaaaacaatatgttatgtttttgactggaaattctcgactgagtctatatgtatatatgtatgccgcctctgatttcaagggccttctaaatgtataaactgtgcattgtccatcaaaaatgatggatattatctttaatacaaaaagcggccgcga

SEQ ID NO: 89 - DNA, 733 bp, Arabidopsis thaliana
ccacgcgtccgagtgccgttccatggagtatgatggctttcacaggatacattgctggtttttggtcggatttgttgatacggcgtggtacaagcatcaccttaacgcgaaaaatcatgcagtccattggtttcattggtcctggaattgctctcattggtctaacgacggcaaaacaacctttagtggcatcagcctggcttagtttagccgttgggcttaaatcattcagccatttggggtttcttattaatcttcaggaaattgctcccgaatattccggtgttctacatggaatgtgtcttactgctgggacattagctgcgatagttggcacagttggagctggtttctttgtagaactattgggctccttccagggattcatccttcttacagcaatattgtatctcctttctgctctcttttacaacatatacgcaactggagaaagagtagattttgacacaacagcagcttgaaggtgaccacaaagtcacttaataggtggatcagctagtaaagaagttgcaactctatatagaatcagcttttgctctccaagtaaataccaggaacaagacctcggctttgtacagaaactagaatttcttcgtctcgatggttctctccttgataaataaatgaaaaaatgtagcaagttatctatgttcaatgtcgtgaatcgccttagagaagataatgaaaacaatgttgacgtagtatttgtttg

SEQ ID NO: 90 - DNA, 733 bp, Arabidopsis thaliana
ccacgcgtccgtcaaagccttatttcaatgaagccgggtatgataagcaggtcggaactgcggaaggagaaaaaaactcactgggatacaacgagaatactttcttgctaaattgtaaaaccatgatgtatcttatgcggaaaccaccaaaggattttgaagaactcatcaaagatcatttcagaaaacgcggatattacattttgaaggcatgtgacgcctacatgaaaggatatctcataggttccctcaccaaagatgcctcggttatcgatgaacgcagcagcgctaattcaacttcagttggttttaagcttatgctggctaagatagcaccaaagcttttctcagcactgagcgaggtaggagctgactgcaatgaattccagcatctgcagcagcaataacacaatcctaaaaggagctggatacaccgatcgttgccaatgaaccaagtgaaggtttgcggcttctttactattacaagtttcaaattcagatatttctgaaacgtgtgtagtagagtttttttggagttatacaagaattaagcgatactaagttgtaaccccatctggtcgaacaatatcgacaaatgaatttgttttggttggtcatgttttggggcctacttaaaagttttaggggtgcacttcaacacctgtttcttttgtcatgggttgtcaaattacttttctaacaaagattatttaagtaaaaaaaaaaaaaaaaa

SEQ ID NO: 91 - DNA, 733 bp, Arabidopsis thaliana
tgagagataagatgggtttcgtctgaagagctccaacttgattcgctcaattgatctcttttgtatcgacaacctgcgatggcgccggcggaatctggagtctctccccgtcggaatccttctcaactctcgtggatgaatctctctagtaacttgattttggcctaccagagctttggtgtagtctacggtgatctcagtacttctcctctttatgtcttccctagcacatttattggaaagttgcacaagcatcacaacgaggatgccgtatttggtgctttctctttgattttctggaccctcacgctcattccccttctcaaataccttcttgtattactgagtgccgatgacaatggagaaggcggaacatttgctctctattccctgctttgtaggcatgctaagcttagcttacttcctaaccagcaagctgctgatgaggagctctcagcttacaagtttggtccttccacggatactgtaacttcatcccccttcagaacatttcttgaaaagcacaaaaggctgaggaccgctttgctgcttgttgtactttttggagctgctatggtcattggagacggggttctgaccccagctttatcagttctgtcgtccttgtcaggcttgcaagctacagagaagaatgtgactgatggcgaactactggtgcttgcctgtgtcatattggtcggactgtttgctttgcaacattgtggtactcaca

SEQ ID NO: 92 - DNA, 732 bp, Arabidopsis thaliana
  misc_feature (1)...(732): n = A,T,C or G
gtccggggaaatggtaacataactcatcagcagcagccttcatcatcttcttctgtctatggttcctcgtcgtctcctgtttcagctcttgaacttttaagaaccggagttaatgtttcttcaagatcagggattaactcatcgttcatgccttccggttcaatgatggattcaaacactgtgctttacacttcttcagggtttccaacaatggtggattacaagccaagtaatctctccttctctaccgatcatcaagggcttggacacaatagcaacaataggtctgaagctcttcatagtgatcatcaccaacaaggtagagttttgtttccatttggggatcaaatgaaggagctttcatcaagcataacacaagaagttgatcatgatgataatcaacaacagaagagtcatggaaataataataataataataactcaagccctaataatggatattggagtgggatgttcagtactacaggaggaggatcttcatggtgaagcaaaatgatcaaaaggagattatgaaattagctttctaattctctttttatgatctcttgcctcacatgggttactttagttaaagttgtcagaacttagctaacacaacatagtctttttattcttcctttcctttttttttttttttttttttttgnnnaaatcaatatttattttctaaatgttttgtagtttggtttgatgataatttgggttggtttt

SEQ ID NO: 93 - DNA, 732 bp, Arabidopsis thaliana
tcaaatttttaaaataaattggaaaaattaagcaaaaacgtttatttccaaccaaaatattcatataaacccgccaatattatttttgttttgtgttgggttatgaattattgcgagcattatttttgtattgttcccaattcccaggaatggtcagacaagaggaagctctttgaactgtgttttgagcttggaggctactgcatcaatgaactcttccgtgttcaaaaacaaatccctactcaccttgggaccatggattaaaagggcaagatccttggtcattttccctgtctcaacagtgtttacacatgacgactcgagcttcttcacgaaatccattaatttctcgttcttatccagtttcgccctgtgttctaagccgcgtgtccatgcaaatattgaggctatgctgttagtactggtttcttgtcccttttggtgcagtcggaaatgccgagttactgttccatgagccgcttccgactcgagtgttttcccatcagcggacagcaaaacggaggtcatgaggcctaatgagccaaacccttgggcaagaagatcgctttgaacatcaccgtcgtagtttttgcaagcccagacatagccaccttcacttttgactgcgtaagccaccatgtcatcaatcaaccggtgctcgtaccagattgagtgctcttcaaacttttgcttccaattcgcctcataaacttcttgaaatatgtccttaaa

SEQ ID NO: 94 - DNA, 732 bp, Arabidopsis thaliana
ccacgcgtccgcagagagagctaaagctacagtgtacagaagaaaatgagaggactctccagaaactccggcgcggcggcgatattcgcgattctactcattctcgccgttcataactggtccgtcgccgtatcttctcaatccaccgaattcgccggagatttccctccattcgaaacagagtgccgcggtacaattgccgagtgctctgtttccgccgccctcggagacggaggagatctattctacggcggaggagaaatgggagaggagttcgagatggactcagagatcaaccggcgcatattagctacgaggaggtacatcagctatggtgcgctgaggagaaacacaattccgtgctcacgtcgcggcgcatcttactacaattgtcgacgtggcgctcaggccaatccttactctcgtggctgcagcgccatcactcgctgccggcgctcatgaatctatcactgtcagtctcactgtaattcttttttcttttctttttctgatatataatttttcagaaatttctcttttcttttgttaccggtttatatttctaagttcattgcggattattagagtttcatacacatgtaaatgtttctgggaatttatctctgttattgatgtaagtttgtttacataaaccagaaaaaaaactatggaataaatacattataattaatagtatcatcactcataaacgaaaaaaaaaaaaaaaaaaag

SEQ ID NO: 95 - DNA, 732 bp, Arabidopsis thaliana
  misc_feature (1)...(732): n = A,T,C or G
caagctctttgtgaggccttgtctttagacaaaccatcatccactctttcatcatcttcatcattaccgacaccagtaatcacacaacnnnacatccgtaacttctcatcagctttgcttgaccgttgttatgatccatcctcttcttcttcatctaccacaaccaccactacaagcaacactactaatccatacccatcaggggtatatgcgtcaagtgctgagaacatcgcccggttgcttcaagatttcatgaaagacacacccaaggctttaactttatcatcttcatctccggtttcagagactggaccactcactgctgcagtctcggaagaaggtggagaagggtttgaacaatctttcttcagcttcaattcaatggacgaaactcaaaacttgactcaggagacaagcttcttccatgatcaagtgatcaaaccggaaataacaatggaccaagatcatggtctaatatcacaagggtctctgtctttgtttgagaaatggttatttgatgagcaaagccacgagatggttggtatggcactagcaggacaagaagggatgttctagttctagaagactgtctagaactaacaaagtgggatctttttaaaattgagggcttaattagttatgagttataacaaataatatagagttataacctatgatatatatgcttattattgctttagggttttagagtctttagtagctaggcggccg

SEQ ID NO: 96 - DNA, 732 bp, Arabidopsis thaliana
  misc_feature (1)...(732): n = A,T,C or G
ggacagctgatcatcgaatttcaggcacttactcgttggaacatggcatattgttgnnattacaaacaaaatctagcgggtgataaacagtgaacagaagnangctcctttgtaaatgcagaattatattcaaagtatatgtggagacaacaatcatcactgtatgagttgcagaatcacacaaaaggattttaaagaaagccatctcttttatcttgttcttgagcttccttattagcagcttcaacggatttgaaccataggaacacagaagtggggattccagtaagagcaaagaatccaagcacaggagtataaaagatgctgtcagattccaagatcccgaaaactggattcttgcttgtgtactcgaaaacagaaccaatagcagcaatggcagtaatcgcggaagctagcagataaacaaagaaaggaacctcaaagctctcttgggacgtagaagaacgaccttcgtttctagcccaaggaggtggctcatctgagtcaggattcgcccaagacggttcactttctttagattttttagatccctccgtcgccgccgtcacaaccaatctcctcactgtactacgttcgtaatggagcaagtgacccttcctcctcccagccagaggatgatggcctggaaatggtgatttggtaggtgaacggttgcaacattcatcaccatggctaagacaaaaaccggtcggaagagatgttagagacgcg

SEQ ID NO: 97 - DNA, 731 bp, Arabidopsis thaliana
  misc_feature (1)...(731): n = A,T,C or G
ccaccaagaatccaaattcatcaagatatatagctgcaagagtcatagcttcagaaacaagagagcaaagctgtaaaatcagtaatctctctagccgtagagaagcaatgcttttggtactcggcgtctcaggaggattatcaatgagctcacttgcggcgtatgcagctggtttacctccagaagataaaccaagactctgtgaagcagaatgcgagaaagagcttgaaaatgttccaatggtaactacagagtcagggcttcagtataaggatattaaagttggtagaggcccgagtccaccggttggttttcaggttgctgctaattatgtggctatggttccatcagggcaaatattcgacagttctctggagaaaggtctaccgtatctatttcgcgttggctctggccaggtgatcaaaggacttgatgaaggaatcttgagtatgaaagctggtggcaaacgtagactctacatnncannnnnnttggcgtttccaaanggtctagtttcagctccagggaggccgagagttgcgccaaacagcccggtgatatttgacgtgagcttagagttcataccangtctcgattcagaggaagagtgaaactctgttttttcaagtgcaaattgtaatcttccatacacaattacaagattctatgtatgatatttatctcattgtactcattcattgaagaacatcacattgattaaaaacgtcagt

SEQ ID NO: 98 - DNA, 731 bp, Arabidopsis thaliana
ttaagaaagaaaaacatttcaattttgcattaaaaagcagaagagaaaactcaaatgttaaataaaaacaatgcatgaagattatgaatgaaacgagtatttggagattcattagctgtatcaaaaactcaagcaatgtttaatctgactcatgttaaaaatctgatcatcatgctttattactactacccaataaagtcactagctcaactttcttcatctttgaaattcctttgagtcctcttgattttgctatggctctaagttctaccaacttcagtgcactcaaatcttcgtctttcgcagtctcttcctcggtagtcggtattgagagactcgtcatcatctgataactcatctataacgaagttatgatcctcctcatcttcatcttcctcttggtaaaacgactctagtttcagctctgacactgattcgagaatagcaagttctggttcagattcaggttcatactcagcctcaggttcaggttcatcatactcagctgcagactcaggctcaggctcgtattcaggttcatcacgcgactctacttgatcctttttctgggtccaagtcacactgtaacttgaagcttcatcaaaaatggcctcactagaataactggcttgagatttatgtctcggtacaggagaattacgtttgaagcttgatgctggcctggtaaagggtgttgcattatgatctttgtttcgcgaatcgaaacgact

SEQ ID NO: 99 - DNA, 731 bp, Arabidopsis thaliana
gacaagacgagttgatgagaatccacgaggacacggatcatgaagaggaaacgaatcctttagcaatcgtgccggaccagtatcctggttcgggtttggatcctggaagtgataatgggccgggtcagagtcgggttgggtcgacggtgcaaagagttaagagggaagaggtggaagcgaagataacggcgtggcagacggcaaaactggctaagattaataacaggtttaagagggaagacgccgttattaacggttggtttaatgaacaagttaacaaggccaactcttggatgaagaaaattgagaggaagctagaggagagaaaagcaaaagcgatggagaaaacgcaaaacaatgtggcgaaagcgcagaggaaagcggaggagagaagagcgacggcagaggcaaagagagggacagaggttgcaaaagtagttgaagttgctaatctcatgagagcccttggacgtcctcctgccaaacgctccttcttctctttctcctaatttttagttatatcaaaccattaaattaaacagtactcgttatatatctagttagtaaacaaaggggcagttttatagctcatgtacacataattgagagtgtagtactgttgtgtcatgtgtggttttgtacttttcttagttacacacaccatacaagaaaaaaagaagatcataattcaacttaattttgatttttgaataaaaaaaaaaaaaaaaaaa

SEQ ID NO: 100 - DNA, 731 bp, Arabidopsis thaliana
  misc_feature (1)...(731): n = A,T,C or G
atcaatcatcggtggccaccaaaatgtcatcctgatgcgtcatggtgatcgactcgacaatttcgagccactctggacttcaacagctgcgagaccgtgggatccaccgcttgctcaagacggtaaggatcgggcctttagaactggtcagagaatccggtctcaacttggggttccgattcaccgtgtcttcgtctcccctttcctccgctgcatccagaccgcttccgaagtcgttgccgccctctcagccgtcgatttcgatcccattgctatgtcatctaaagacgtgctttccatcgacaatactaagatcaaggtggctattgaatttggattgtccgagataccgcacccaatctttattaagagtgaagttgctcccaaagatgggaaatttgatttcaagatttcagatcttgaagctatgtttcctgaaggaacagtggattctaatgtggatatggtttataaagaggtgccagaatggggagaatctgcacaagcctttgaggatcgatattataagacagtgaagattcttgcggagaagtatccttctgagaacttgctcttagtcactcattggggagcagtaagtgttgcattttacaactacnnnnannnnncaactaagtacgtggtagattattgtggtagtgttgaaatgagaaggcagattttgaatggtgatgggtttggtaaatttgaggtagttactagtcatggag

SEQ ID NO: 101 - DNA, 731 bp, Arabidopsis thaliana
ccacgcgtccgcacaaacgagtaagaatacaaacacaaatagcaaaaaaatggcaaacaagctcttcctcgtctgcgcaactttcgccctctgcttcctcctcaccaacgcttccatctaccgcactgttgtcgagttcgacgaagatgacgccagcaaccccatgggcccaagacagaaatgtcagaaggagtttcagcaatcacagcacctaagagcttgccagaaattgatgcgcatgcaaatgaggcaaggccgtggtggtggtccctccctcgacgatgagttcgatttggaagacgacatcgagaacccacaaggcccccagcagggacaccagatcctccagcagtgctgcagcgagcttcgccaggaagagccagtttgtgtttgccccaccttgagacaagctgccagggccgttagcctccagggacaacacggaccattccaatccaggaaaatttacaagacagctaagtacttgcctaacatttgcaagatccagcaagttggtgaatgccccttccagaccaccatccctttcttccctccttactaatagattccaaacaaaaaccctcgagcgtatgagagtgtggttgttgatacatgttaacaccacacctcatcgtgtcttttatgaaaatgtaagttttggatgtttgaggctaaatgtatttagcacaagtccttaataaataagagttttgtttatgtttcaaaaaaaa

SEQ ID NO: 102 - DNA, 731 bp, Arabidopsis thaliana
cctacagaatctcggagaaaccttaccggcggggcgggaaccatgcgtcttcactcagcaattactctccgaaatctgttcaccagaaagtctctccgaatcccacagaatctaagcattaccgcttccccgttattgattggagatgtctccggtcaaatcaaaccttcatcaacgtctcactattcgaaatctagtctctcagaagcgtcatcatcatcatctagctcactaattttccagatcccaaacaacgcttcattcttcctggaaaatcagaggagatacagcaccggctccagcagcggttcaccgccagatgtaaacaaggtagtggacgagattaatctcaagttcgctgaagctcgtgaagagatcgaaatggctatggatgcgaaggagacggtttacttcaacgaagaagcggagtgcgcgagagacgccgtggcagaggttttggagatgtttcaaggtttgctcgggaaagtaacagagaaggagaaagcttctctgcaacgatccatgggactcaagatcgaacagctaaaagctgagcttgaacagctgaacgaatgatcgattgctgattttgattccgtggagaaacgaagaggttagcagaaattttcctcttcttcaccgagccattgttgttagctgattatcatctgtgtgtgccttaataaatctactccatttaggtcaaattcagagcatttgcaatgcttgtg

SEQ ID NO: 103 - DNA, 731 bp, Arabidopsis thaliana
aacgatagctttaaagtacacaataagatttgatactaattaagtttcaattattccaactcgaaccagcaatctaaccgacgaaagtcaacttatataatgtttagggcttatttgaaacattggtcagtccagacagattcacaaaaggtattaactagatcacttccacttcttgaacttgcctcctccaaacattccatgcttcccatgcttgaacttcccgtgcttcccatgcttgaacttaccatgaccatgaccatagccatagccatgaccatggccaaaaccgtgaccatatgcagcatgtccgtaaggaccgtgagagctatgagctacgtggtgagctccataggcagctgcagcacctgcaatcatacccccaattcctcctgcgtgtcctgagtgatgagcaggatagccagcaggagggtaaccaccatgaccaggtgcaggaggataacctccataaccaggagctggaggataaccaccataaccaggggcgggaggataaccaccaggagcaggtgggtaggcacccggaggataacctgcaggcgggtaagcaccgggtggtggagggtaaccttgttgtgggtatccagcgggtggataagccccagggggtgggtatccagcgggaggatacccatgaaaccctttgtctttgtcattatcattgtcacctcccatgttttctcaatcagtaacaaaaccttagacgaatc

SEQ ID NO: 104 - DNA, 731 bp, Arabidopsis thaliana
ttttttttttttttgaataaacaacaatgagaaatttattagaagtatcacaatccgttactcaaattacaaaccatgaccttaattattactattgtaactttatagagtctatttcttttgtttgagcatttatgatgctgaaaccacactccagagatcagatccaggcaggcttatttagagcagtgacgactgccttgatctgcaagtaattattgagactgtatatgcctttctctctcccattcccactcatcttgtaaccaccaaatggtatggctgcatcaaatacgtcgaagcagttaacccatacggtaccagctttcaaagcccttgaaaccctgtttgccgtgtccagattcttcgtgaaaacccctgccgctagcccgtacttcgtctcgttcgccctctttatcacctcatccacatcactgaacttcaagatcgattggactggaccgaaaatctcgtcttgagcgataagcatgtcatccttaacattagagaagacagtaggttggatgaagtaacctttgtctccaatctgatcaccaccacattcaagagtagcattgctttcgatacctgactttatgtacttcatcactttctcaaattgcttcaaatcgatctgaggaccctgttcaatgcctttcctgaaaggatcaccaacaacacgtttcaatgcgcgtgcctttgatttctcaacaaactcatcatacactttc

SEQ ID NO: 105 - DNA, 731 bp, Arabidopsis thaliana
gatgggttcggcgaacaacgagtacgagtttctgagtgagattgggctgacttctcacaacttgggatcttacgttgctggcaaatggcaagccaacggacctcttgtttcaactctcaatcctgctaacaatcagccaattgctcaagttgtggaagcttcactagaggattacgagcaaggtttgaaagcttgcgaggaagcagctaaaatatggatgcaggttacggctcctaagagaggtgatatcgtcagacagattggggatgcactaagatccaaacttgactatcttggtcgtcttctttctcttgaaatgggaaagatccttgctgaaggtattggagaagttcaggaagtaattgacatgtgtgattttgctgttggtttgagccgacaactcaatggatcggttataccttcagaacgccctaaccacatgatgttggagatgtggaatcctcttggcattgttggtgttatcacagcgtttaattttccctgtgcagttcttggttggaatgcttgtattgctcttgtctgtggaaactgtgtagtctggaaaggtgctccaactacaccgttaataactatcgcaatgaccaagctagtagctgaagttttagagaaaaacaacttacccggtgccatttttacggccatgtgtggtggtgctgaaattggtgaagcaatagccaaagacacacgcattcccttagtatcctttactg

SEQ ID NO: 106 - DNA, 731 bp, Arabidopsis thaliana
ctttttttttttttttttttttttcttgatgacttagaaattgtattcttagcaaatttatgaaataaagagagtgggtaatcgtctaatagactcatcaacaatgtaacactttaaaggagtgatttatatgatccaacatggttgtttcatatacaatacataaacacaacttgacaccatcatatattcactaaaaggattcttccaaatctccccttcttcatacttaactcatagcttcgaaacaggcaatcctgaaaaaacccaaagaatatatatatgagagtaattttaatagagagaatgggaacaaatttgtttaagtggattagtcaatgttcttttgtttctgtttatgtttaaatattttgttaacaggaaatgcaagcataaattagcgtttgaaacaatctgaggcatgagtgtaagtgttgtgtagtacctaaggcctttgagttgacgatgcttggactggcattgggcggtgaagcgttttcgttcaagaatggatcgactcggttcgggtcatgccaaatcgggtaccctttgactcttccctgttaaacattttcagaggctgatcagaatttagtcattttgaatcttataagaatgagttttcttggaatgaaaatacatacgaggacgttgagagctgcaagcgtagccattccttcacgagtccactgtcatcatcagaagaagttaagttaaggtcagttctgtta

SEQ ID NO: 107 - DNA, 730 bp, Arabidopsis thaliana
ggccaccgcgatacctctcttcgcctctttcaagtatgccgatagtctcaccgtcgttggaatctctttctgcacggcgttggtctgcgaagcaatctcatggatcctaatctatcgcacaagctcttacaaatcgttgaaatcttccattgacaaagcctctaagaagcttgagacgatgaagacagataatccttcctcgaagctaacaaacaagaaatcgaagacgaagaagatagatcgcgttgaatccagcttaaaggaatcgagcagagatctatcactcttcaagtttaaatctggtgccgttgtggctttggttctctttgtcgtgtttggattgttgaattcgcttttcgaagggaaagtggtagcgaagcttccgtttcatccgattacgattgtgaggaagatgagtcatagaggattgaaaggcgatgattccactgattgttccatggcttttctttatctgctttgttctattagtataaggactaatctgcagaagttcttgggtttctctccacctagaggagctgctggtgctggtggtttgttcccaatgcctgatccaaagaccaattgatcaggtttgatctgatgatgaattggattctggattctgagctcgttgttactctgaaattttcatagataacttcaatgctctgatgtagtggtgttgttttcagttcgtttgatgagaaacactttcaaaaaaaaaaaa

SEQ ID NO: 108 - DNA, 730 bp, Arabidopsis thaliana
acaaaccataaaatcacatcttctttacaacaatgcagtactacgaaaaccgtgagaaagactactacgaggtggctcaaggccaacgcaatggttatggccagagccagagccacaaccacgagggatatggccagagccagagccgtgggggatatggccagatccataaccgtgagggttataaccaaaaccgtgagggatatagccaaagccagagtcgcccagtatatgggcttagcccgactttgaaccaccgtagccacggtgggtttcttgatgggctcttcaagggtcaaaatggccaaaagggtcagagtgggctaggcacgtttctagggcaacacaagagccaagaggctaaaaagagtcaaggacatgggaagctcttggggcaacatgaccagaagaaaactcatgagacaaacagtggtcttaatggccttggaatgttcattaacaatggtgagaagaaacataggaggaaaagtgagcacaagaagaagaacaaggatgggcatggcagtggtaatgagagtggaagcagcagcggtagcgacagcgactgaatatcatatgcttgctctgaagaaagtaacgcttctaagagtgactaaattaagtacttggatgtaatacttaaaataaaatcacttaggtggttgtctttgtgtgtcctatataacctcgctactacatgaatctacttttatagttttgttgcaaaaaa

SEQ ID NO: 109 - DNA, 730 bp, Arabidopsis thaliana
agctcctctccttgttggtcacacagcttcaatggcggtgcaaatgaaaccctaaaagtatctgagcgaaggttcaattttgaagttgtttcccagaagaaagctaagaaacttcgcaaggtaattttgaaagaggatgtgacggatttgggtaagcaagggcaattacttgatgtgaaagctggatttttcagaaacttcctcttgcctactggaaaggctcagcttatgactccacttctgctcaaggaattgaagatggaagacgaacggattgaggcagagaagcaaagggtgaaagaagaggcacaacaactggcgatggtattccaaaccgttggtgctttcaaggttaaacgcaaaggcggtaaaggcaaactgatatttggatctgtcacagctcaagacctcgtcgacatcatcaaatcacagctccaaaaggacatcgacaaacgccttgtctctctcccagaaatccgtgaaaccggagaatacatagccgaactcaagcttcaccccgatgtcactgctcgagttaagatcaatgttttcgctaactaaaccttcaacgattcaagactcctactgcatcccaaggaacgtatagagagggaaaagagagtagcctcttgtggtgaggattgaaggttgtgaagtttttcctttagattgtttgatgcatttgtatttttgctatttttggaatctggaaacgctaaaagtataatat

SEQ ID NO: 110 - DNA, 730 bp, Arabidopsis thaliana
ctccaggaagcacttcctgatatattggagaaaacacctaaagagttcttcgagaagaagatcaaagccatgagacgcaacgtcgagctttcatgtgagaggctcaaggatattccttgtctctttttgtcccaagaaacccgaatcttgttcttatttatggttgaagcttgacacatcaatgttgaataatatcaaaaatgattttgatttctgcacgaagctagttagtgaggagagtcttatccttataccaggagtggctctaggggcagagaattgggtgaggatatcgataggaaccgacgaatcagtggtacaagaaatatttgacagactaaaaggtttctatgatcgtcatgccatctccaaggaagctatcaaactcagtggccatgccattaaccagatcgtcgtctctgtcaactgattgtagtagtcctatgccacaagtccacattataatttgtgcgtaattccttaattatcaggaacacaatcaagaaaaatagcattggataatgaaataaagatgtgtgaaaaataaaaggatatttgttttcattattatactcattttcaacatagtttttgatacattgtctatataaaattgaacaagtgaacaaaaagaaagttcaattaagagtgttcttcaaaagctctctaaaaaaaaaaaaaaaaaaaaaaaaaaaaaaaaaaaaaaaaaaaaaaaaaaaaaaaaaaaaaa

SEQ ID NO: 111 - DNA, 729 bp, Arabidopsis thaliana
ccacgcgtccgcagtgatctctgggatcagaaagatggaattgctgccgttgtactcttgaggcatttcggatgcgtttgctgttgggaacttgctactgctttgaaagaggctaaaccgagatttgatgcggctggtgttaaattgatagctgttggagttggaactcctgacaaggctcgtatacttgcaactcggttaccttttcccatggaatgtctttatgcggatcctgaacgcaaggcatatgatgttcttggtttatacttcggtttgggccgcactttcttcaacccagctagcaccaaggtcttctcaagatttagcgagattcgagaagcaacaaaaaattacaccatagaagccactcctgaagacagaagcagtgtgttgcaacagggaggtacgtttgtgttcagaggcaagaaattattgtacggtcgaaaagacgaaggcacgggagatcatccatctctggatgatgtcattaatgtctgctgcaaagccactgttgcttgaaacatatgggatcaaagtctctctggtttgtcctcatacttaaaaatcactgtatatttgtagctatgaaataatgtctatatttctttaagctttggaaaaagtatcaacactaagaagttagagcaacatatgtccaagtccagtctctctcaccgctcatgtagatttttgtaagatgtcgacaattcattgaaaccacacaagtct

SEQ ID NO: 112 - DNA, 729 bp, Arabidopsis thaliana
ctctgagtgacaatttttttttcttttttcacaagtgttctttattcatattacaaagccaaatcatatgccattattttacaaaaccaaaagaaacaggccgaaagaaacaggccatattatacaaagaaaaaatacaataaaacaaagtgaaagcccaaaagcccaaacagaaaccctttcactgaaaaaacggtgttgtaaacagcacatagaacacgtggcaagagggaaccagatttgatgacacgtgagaagtcgaagaagagagagtttccgatcaccagaatgatgtgacgccggaaagttttaattccgattgaaaccaccggaaaattgctcaacttttgcagcaacaaaactcaatcttcgcccaaaaaatttaaagcgaaatcccaagttagctttgatgagaatactttctaattgaagcaattctgtaatacttctgcatcttcaaacaataactttataatcttcagaaaaggaatttatcaccaaccgaggcttgcttttattaacctaattcgaatccaataaactagacgatgtctaataaccaaaggcagaacttcagtcaatcggactgtcttttcttcagatctgaagccaaaaaaaaactcaaagtgcgtgagagccgaccgatctcgctacagaaaccgataacgtcggagttaaaccagccaaacttgttttaaaagccaaaagttgctggaaaggagccagcca

SEQ ID NO: 113 - DNA, 729 bp, Arabidopsis thaliana
cctctctagcaaggaccctgtcacctcgagttttggagagtcaaatagatgccaaaaaggaactggaaaaatgtcttaagacaacttgtgaggagttcatcatgtcagtaactaagctagttgtggatcctatgctttcatttgtgacgaaggtcacagccataaaagttgctctttcctccggaactcagaatcacaaagttgattctgtcatggctaagccgctgaaggaacaagctttcgcgacaccagataaggtggttgaacttgttcaaaaggtatacgctgcgatacaacaagagttgcttccgattttagcaaaaatgaaactctatttgcaaaacccatcaacaaggaccatacttttcaagccgatcaagacaaatatagtggaagctcatacgcaagtggagtctttgctcaaagctgagtactcagctgaagaacaagccaatattaatatgatctccattcaggatttgcaaacccaactcgacaatttcctttaaggtcatggctcaatcgatgtttttgtgatgtccgtacttcctctggttatatcttatataatgactttgattcttttgactccttttagctactttacaagagttcgctttagaagaatacatattattttgtatccaagaactcatacatcttggtctctctacattcgatctatctacggtcaaaaagtgtagatcatatgcttatataagactagct

SEQ ID NO: 114 - DNA, 729 bp, Arabidopsis thaliana
  misc_feature (1)...(729): n = A,T,C or G
taatcatcagttgcgaggtcaaaatacattttttttttttgtcctacgagaggaaagcaataaatacattcccccaaaacaactcaaaatagaccacacactgcaacaacaaatggaaaaaccaatttgcaaaattacacccaaaaaattgaaacgcggaaaacacacccatatacaaaataaacaataatgaatatgaccccaagacacaagataaacccactgaaccataagtacaagcggctcgtcaggtgtctgcgtcgataggggcaccgtttctagcctgcgagatccggtttgcatagatggtcactagacgaacctgcgtgctgtttagaccttccaaatacggcaaaaatgctttcccaagcattatatatatgtctactagacagaacaccactgtcttgcggacatccgcgctttggctcccaaatgcttcaaaaaccgcaggcaaaaaagacgacaattgatccattaattcctcttgcgagagcctacccacaagcttcgttaaacaatttatgcaagcgacaagagttttctcatcttccgtcaccaannntnggacaataacgcttaagcatctgnnngnatcgtattgggacaagactgtggtcaaacattgctcagcttcagtgnnnncttttggaacggtgtcctttgagacatgaagcagcttttcgatcactatttcaacagagtcttccatggcatctttctggctct

SEQ ID NO: 115 - DNA, 729 bp, Arabidopsis thaliana
ccacgcgtccgaagacctctcagcagccaacgacagttatcaaagcttaagccgttttagggttttatccttttgctgagatccaatcatggcggatgttgaaccagaggttgctgctgctggagttcccaagaagaggacgtttaagaagtttgccttcaaaggagttgatctcgatgctcttctcgatatgtctactgatgatcttgtcaagctcttctcttctcgtattcgtagaaggttctctagaggtttgacaaggaagccaatggctctgattaagaagctgaggaaagcgaaaagggaggcaccacaaggtgagaagccagaaccagtgagaacccacttgaggaacatgatcatcgtccctgaaatgattggaagcatcattggagtgtacaacggaaagactttcaaccaggttgagatcaagcctgagatgattggtcactacctggctgagttctctatctcatacaagccggtcaagcacggtaggcctggtgttggtgctacccactcttccagattcattccccttaagtgaaaagcttctattggggaatgtgtttacttgctcgttatatgtggatctaagtacgtggatctcttatgtttttgaagctttataatgacattactttagaagctttctcaattctagctcttgcgttttcattatcatgttacaagaggatcttaaatcaaatcattttggatttttgttat

SEQ ID NO: 116 - DNA, 728 bp, Arabidopsis thaliana
cgcactcccttcgcctgcttctccgtttctatctgcaccaaaccggaatcgagttcgtgttcttgcgaaatcatgcccggagaatcagagcttcgactccaacgattcggattcttcctcagagactacccacaaagcccagggagatcagaaatcagtgtcacggagacagtggatgacggcatgtgtgtgcgcatctgcagctttaattagcaattcttatacctttgtctctgtacaaagcgcagccgctttagacaagaaaccaggaggttcatgtcgtaactgccagggcagtggtgctgttctttgtgatatgtgtggtggtacaggaaaatggaaagctctcaaccgaaaacgtgcgaaagatgtatatgagtttacggaatgtccaaactgttacggtcgaggtaagcttgtttgtccggtctgtttaggtacaggtttaccaaacaacaaaggccttcttagaaggcctggtgctcgtgagctactcgaaaagatgtacaatggtcggcttcttcctgattcatgagaagattgttactgcaaatatgattttaagcacagagccagtagacatgatgatagaagcggatgaaaacttacacattgaggatgcatggaaagctatagaagaatgtatcgaattcaacatgtttttataatgctgctaggtttgtgttgtaaattctataaacataaaactttccttcttccccatacag

SEQ ID NO: 117 - DNA, 728 bp, Arabidopsis thaliana
cagctttaacaccctcatgaatcaaaagagtagcgtcaccaccatcatcaacaatcagatcaggaccaccacctggaccccaatctagagcacgctcggtacaccaccagtactcctgaagagtctcacctttccaggcgaaaacagcggcggagtcacgagcgatggctgcggcggcgtggtcttgagtggaaaagatgttgcaggaacaccatctgacttcagcaccgagagcagttagggtttcgatgagtacggcggtttggatggtcatgtgaagagatccggtgattctagcgcctttgaatggctgagaaggtccgaattcggtacgacaagccatgagtccaggcatctcaacttcggcgagctcgagttcgagacgaccgaaatcggcttgagacatgtctttgaccttgtattcacggccacttgaggtcttctcgacgagcaacgccatggttggcggccgcgaattttgaaattgatgcaattttgaaagaaaataaacattcttgttccatcacaaatactactagaagacaactctgctttaagacctctactttcctctagacttcttggatggttttcttttgctttcaatccttctctgggcagcttcaaattcttcttcagtgggctctgcttccgcatcaccaccatacctagagataagtgatgaaaacatcgagtccaccttccctttcctctcctcttgtcgtttc

SEQ ID NO: 118 - DNA, 728 bp, Arabidopsis thaliana
ttaaagcaaaacacatacaaacgcagtcaccttctctgtcgcctccttcttcaatctcatcgcaatcatgatcatatccgagactaatcgccgtgagatctccaagtacctcttcaaagagggtgttttgtttgccaaaaaggatttcaatttaccacaacatcctttgattgagagtgttccaaatctgcaagttatcaagttgatgcagagtttcaaatctaaggaatatgtgagagagacctttgcttggatgcattactactggttcctcacaaatgaaggtattgactttcttaggacttaccttaatctcccatctgagattgttcctgctactctgaagaagcaacagaagcctcttggtcgaccttttggaggtggtggtgaccgtccccgtggccctcctcgtggtgatggagagaggaggtttggtgacagagatggataccgtggaggtcctaaatcaggtggagagtatggtgacaaggctggagcacctgctgattaccagcctggcttcaggggtggagctagtggagcaaggcaagggtttggtcgtggagctggtggttttggtggtggtgctggtccagctgctggatctgatctaccttgaaaaggactttcttgtttctttttggtcttatttaaggttacatagcaccttattgagaacgaatgtgtcttttggaactttgtttctttctcttaaaccatttcacaaa

SEQ ID NO: 119 - DNA, 728 bp, Arabidopsis thaliana
  misc_feature (1)...(728): n = A,T,C or G
ctgcaattttgcttctcaatagtggatggtcgtggactccatccaactgtaggaacaaattcgttagaggagacttgcttattcatttatcgaaacctgatggatagtgttgattgtttttcaccggatgcaactctaattgtgaagcttagtggattagtatttttctcaaaccttatttgttgtgatgcgatctttgcacctgttcctatttgtgtttgtatcttgaggatctatattcccactagcaagcctaaccatgtcaccccaagcctaatgggcgaagcatcccaaccttctcaaactttttggataaaaccgcctcaaagaaaactccatccgagctccgctgcattctttgtgtattggacttgtgaattcccttggcgaatccagcaaacttactcctctatggagataccatctttggaaccttactttnnnagcgaggaaaagcctccgcccgcaacctcctccatggaacaccttttcgaaagctctttggcgttaatcgtacgagcttattatgatcacaagctgatccgagatttcgtgaagctagtcttcaaatttgaatccttgaaggctccaacagatcttccaacctttgctatcttcttgaagctttgcatcttggaaaactcatggaacctctacccttatctttcatgtagtgttttaaatttcagttgtatgaactcacctcttacgaggttttagttgaatgc

SEQ ID NO: 120 - DNA, 728 bp, Arabidopsis thaliana
  misc_feature (1)...(728): n = A,T,C or G
ctactgtgggttaacatgataatggacacacttggagcactcgcgctagcgactgaaccaccacaggacgacctgatgaagagatctccagtgggaaggaaaggaaacttcataagtaatgtaatgtggaggaacatccttggtcagtcactctaccagcttgtcatcatatggtgtcttcaaacaaagggaaagacaatgtttggtctcgatgnnnccgactctgatctaacactcaatacccttattttcaacatttttgtcttctgccaggtattcaatgagataagctcgagggaaatggaaaaaattgatgtgttcaaggggatactaaagaactacgtattcgtagcggttctaacatgtacagtggtgttccaagtaatcataatcgagctgctgggtacatttgcggatacaacaccattaaatttgggacaatggttggttagcatcatactcgggttccttggcatgcctgttgctgctgccttgaagatgatccctgttggttcacactaagcaacacattgtataatgtgattccttgtgccacaactttggcattgaaaggtaccaattttttctccggcctttggaagtttgatatcccaagatggccttggactagttacggtgcttttttatgttttcattttggccaaatgtataagtgatttggaggagcatttgcttcgtaaatatttcaatgttgtggaacgcggccg

SEQ ID NO: 121 - DNA, 728 bp, Arabidopsis thaliana
tatgacatatattaatattaatacaatcaaacatagattaatgtataatttgaacacccaaactcagagttctaactcggtttcaaagcctcgaatacacattataaactaagcacacaacttaacacatatatatatacaagtgtttttataactttaggaatttcaagacctagcttagttagttaggctccattgttggcgtaggtattaacgagagcgagcgcattactcgtgaacctcttgacgtcggcgactctatcgcaaatagccgtcttcgtctctccgtcttccatctcctccgtgaccccatccgtacacgtctcctcgtccgtcaacgccgcgctcatccacgtctgcacgttactcatctgaaacctaaacgccggatctccgggacgacggtggttcatctctcggagctgccttagggagccacgcatctgatccacggcatctcccacgttcgaaacgcagtcgtggacagcagctgaggcagcgcgacgtgagagtttggagaggtaagccgccgtgtattttgcgcgggagagagaaacgccgattgcgagtttagctagccttgccggattatcttggacggcggaggcgtatccagctagagacgtgtaacatacgtctggatacagcgttgtgttgcagctcgtacggatgaaatctagatcatcggttgttggttgttccggagggaaacggacggctggcggccg

SEQ ID NO: 122 - DNA, 727 bp, Arabidopsis thaliana
aaataacttattcttgattagaggcttttgatttgtaaccaacctaatggttgataatccgcaacatttttcgtagtgcagcaaaatgaaaagtaggttaaatatgggttaagccccaaaaaccattgtttctcttatttgttttgacatcttccggaccaaaatacccttcgtagagattgatttgagtgttctagagtgttgcaatacattcaatctcgatcttggcgtttagaggcaaagctgcaacttgatacgtcgatcgtgctggagaaggagctgggaagtatttggcatatatctcgttcactgtcttgaagtcagccaaatcagccaacatgattgttgtcttcaccaccgaggaataatcagcaccactagctttcaatatctcccccatgtttttgagtacctgctcagtctgatcttcgacgctctccgaaacaaactttccagtctcaggtataagtccaagaacacctgaaagaaaaaccagattattggctttaatggcctgagagtaaggtcccaaagcagctggtgctttctcagtagacacaacttccttcttcacagaagaagcagagacagagagggaagcgaaaggaggagatctagaagacattctgaagagagaaacaccagcgaatgttgcgcagccgacaccagcagcgaccaatggggtacgagtggagcgaagtgcggtggagaggtcgagtgttggagt

SEQ ID NO: 123 - DNA, 727 bp, Arabidopsis thaliana
ttttttttttttttttttttagaagaaataaatattgcatttgataaaaaagaaatatggtcagaagagacatatatatgttcgatagagttgatgaagaatactagagaatgaaaaagatgtatcgatgattcagagagagagagacgggtcaaaaatcaaataagaaatttgcgaaacaagcaacctttcttcttcttcttcttcttcttcttcacagcaaatcagccacgtttgagggaagctcctcaacaaccacattgtagaatttctgaatatcaaacagcattctctgatcatcaagagtcacaaagttaatcgccacaccctttctcccgaaccttccacttcttccgatacggtgaaggtaattctctggctgagttgggaggtcaaagtttatgactagagagacttgctgcacatcgataccacgagccaagagatcggttgtgattagaacacgagacgagccagacctgaactctctcatgatgatgtctctggtgttttggtccatgtctccatgagttgctgagactgtgtggtcacggcttctcattttgtctgtgagccagtcgaccttgcgacgagtgttgacaaagatgacactctgagtgatggctagagtctcgtagagatcgcagagagtctcaagcttccagtcttctttctccacgttcacgtagaattgcttgataccttcaagtgtgagctcatcacgttt

SEQ ID NO: 124 - DNA, 727 bp, Arabidopsis thaliana
ttttttttttttttttttttagagcataacatgattatgtaatacaatgatatatattgatctcgtatatagatctcgacttttaaccagttttgtttacttacacatcgaattaaggtcggaagcaaaaaaaacaaaacgtgtaagtttgttttcagccaatagatgaagttttagcagcgagatgaatcaaagcccgtcgatgatacttgcttcttagctttttgtatttctgcacaaatgcagctgtgtcaatatccttctccataaacttctgttgcagctcctctgattcttcatccacctggttcatagcatctgcgataaacaaacccgggattgtgtattagaaaccgacatgtatcattttgttgttacacatgaaggatattgagtgaagcagctaatggttttacttaccttgaagtctatgaagaagagaacctggagagtagaatttgaggatctcttctctttgattctcaagctcattgagcttctcttgagcagtcgcaagctcggatgtacggattattctgcactgtttttaaaaagattatacaaatggagagaagtttcatatacttaattaactcactcagagattgaatgatattattcacttggtttctgagctccactatctgtggttccttctccaagttttctctagctagatgtaacgtttctttgcgaagctcttctctgatctaatgaacatcggacg

SEQ ID NO: 125 - DNA, 727 bp, Arabidopsis thaliana
atatatactctatagaagaaggaatctttggcttcagaagagtaaatagtcaatcagctcgacactgatcttgttccaaaatatcagagatcttctcaataggaatcatgggtagatactctgccccaaagtagtctctgtcgccaacgtaacgaaccgcatcgttgtacttctctgaccagtaaaacgccgtggggatcactaaatgcgcaacttcagggaacaacggcagttgattcagtaaacgccacagcgtcgctgcgtaatactctgccgctggctcgtacttgtcccggacgcttcttgcaatgctcttggtagtgtccacaacgccggtgcgctgcacctccgtggccaccgtgagcgcttggctagaagcttgcttcaccaatgacggaacatatgtctcaacatcgaagaacacatcgtccaccttacgatcgacgaaaaggagaagcttgaaaggaacgtcgtggaatttttcgtataatggagcaagcacggttcgaacgcaatcttcaatgttctcgacgccgagtttgagtggaccagcgttgtctttagccaactcgtagagggtcgagaaacaggcggcgaagtaaaccgccgcgacttgaatgaattccaagtgcttgagcttcatctcatcgtcgtcttccaccactaacgaaggcgaagacgaagaagatggtggaactggagtaatctcctgtggctgtggcggccg

SEQ ID NO: 126 - DNA, 726 bp, Arabidopsis thaliana
ttttttcacaaactcaaatttttattccaaagcgtaattatacattacgaaatacagtacaagagaaaaacataagagccatcataggagaggatcaaaaccataacaaatatgattgtttctttgttctttttaagagtataataactttgtttgatgcacaacaacaatcaaatcacaatacatggcagaagggtgcttctctagtgaagaaagaacccgaaaaatgaaatttgtttgaagcactttgagtgaacttagagaccagactcgataaggtaatcgccgagcctctccacgaccaagttgcattgccctccggtcatcggttcatcatagataccaaagactagagcttgagtagtcttcttgatagtgactccaccaggtccctttttccctcggatgacggctccagcctcaccttggacaaccatgtacttctcaccgccaaggaatagcccggttggggcaagatgtccggcttcttcaaagtctttgttgattcctgctatctctgcaggcttcaactgagggaaagctgagctctgagcccagacactgccgtcttggccgaagatggcggcgtgtgtgaggtggttgccttcgacctcgcacatgagatggtcatcgacgtatgattgccacgacatctttcttcttctccggcgagatgagactgtttcttcttcttcttcttgtctctgcttcttcttcttcctcttc

SEQ ID NO: 127 - DNA, 726 bp, Arabidopsis thaliana
ttttttttttttttttttttttttttttagaagtcaaccacacatccaaatcaaacacaaaacataaaacaacgaccagtttactgactaaagcaacaaacaaacaacaaaaatagatcatttttaattcttcttcatttccttacattcgtggtcttacttacttcttttaaaaatctcagaaactagagatattgatgttttgaaatttaaaaacaccaccaaaagagatcgcacatattttgtataattagaaagctttgtcatgttccatcttttaagctctcatcttcgatttctccattgctctcggagctgcagctaacccaatagcatcacaccctttcattatcttcagcttcttgcagacatcaataaacatctcccacggaacatctccaacaagcatccagtcaccatccttatcctcataagtgagcacatagtcttttccattcaaaagatccttgagcttggtctcactaagcatatccttcccagcagctccattagatccacattgaccaagagtgaaagtggtgaacattttctccaaggctgaagaaagctccccgtagttagtgtagctcctcaggtcaactttcctcagataaggagcaccatccatactgaccttcacgaagagagccccagaacctggcctcccatcaacttcgtcactgttcttacaagtagtggccaatgtgttcttcctgtaggacggac

SEQ ID NO: 128 - DNA, 726 bp, Arabidopsis thaliana
tttttttttatggaatagttgtagtttcaagtttaaatagatcaagagagatagataacttcaatataatagaacttattagaaggagtagctaacgcaaagtaagcagagaaaataatgatttgacatgattaataacaagcaaactcaaaaacaaatgtgattaaaacatctgcttcatctcttttttcacagcatcatctcttcaataggtgtaccctttgacgaacatgccctccttagcctcttcggactcaccctcaccggtgtattttccgagctgagccaacgaattggccttggcacgggccaagagagtggtctgagctgcgttcacgttctcgggtctgccgccccatgttttcagacaagtgttctgcaacgcacgtgcgtaggagaaggacacgtgccatgggtttggtgcctggttcattgcgttcaagttgagtgttgcctccacctccgactgtcctccggacaaaaacatgattccggggactgcgggagggactctgttgcggaggagcttgagggtgtaggcggcaacttgttcaggagtagctctgtctttagactcagctccgggagtcaccatgctcggttttaggaggataccttcaaacatgacattgttctgagcaaggtaaaagaaaacctcagcccaaaccttctctgctacgtcgtatgttctgtcaatgtcgtgttctccatccaacaagatctctg

SEQ ID NO: 129 - DNA, 725 bp, Arabidopsis thaliana
  misc_feature (1)...(725): n = A,T,C or G
gactcactagtcgatctcctatcctttcttctacccgcccgaaatccgtcgaaacttctcttctttaccattgatttgcctcgtctcagctcaattctcttccgttgctgcttcgtttagttgttgcttcgcttcagtactctggtggtcggagagatgaatcacggccaacaatctggtgaggcaaagcatgaagatgatgctgctcttacagagttccttgcttctctgatggattatactcctactattcctgatgatttagtggagcactacttggctaagagtggatttcagtgtcccgacgtacgattgtaggataaggctagttgctgtggctacacaaaagtttgttgcagatgttgccagtgacgcccttcagcattgcaaggctagaccagcaccagttgtgaaagacaaaaaacagcaaaannataagcgtttggtattgacaatggaagatctttcaaaagctttgcgtgagtatggtgtgaacgtgaagcatccagaatattttgctgatagcccttcgactggaatggaccctgcaacaagggacgaatagaaaccaggaattcctcaaaaatctttgcctagtaaggacggtcatgtgtctcagatccctgattctctgttgtgtttcagttaaaaacaaaactcacttgtcttgctagtcctcaattactacattacatgtatattcgtttgttgtttgttctctggtg

SEQ ID NO: 130 - DNA, 725 bp, Arabidopsis thaliana
cacgcgtccgacgtcacgaagcaaatccaaattcaaaacctttccataaaaatcaaatcacttcttcttattacttcccccaaatcgaaatcagtcacttaaaaccctaaattatgacgatcgcaccggcattgcagacgacgttcgtgtcatcaaccaacttcctgaaacattcttcttcgtggggatcaccatcaccgaacaatgtgattcttcccaaaaacaagagatcttcttcctccgtagttgtcgccgccgtcggtgatgtctcttctgacggaacaatctacttaatcggcggagccatcgccgttgcactcgtcggaactgcattcccgatcctcttcaaacgcaaagacacgtgtccggaatgtgacggagcaggatttgtgaggaaaggaggagtgactctgagagccaacgccgcacggaaggatcttcctcagatcgtttgtgctaactgcaatggactcggaaagcttaaccagattgataaatcataagtcttcttcatatatatgtaaaaagctccatttctcattcctcttcttctctacaatatacctctgcaaaagtagatagcttggaatgatcaatggttgcttggagatgggtggatatatatatatatatatatatacaattgcttttttatgtgtaagtttctttgctttcttgttctgtaagaaattgtctgggtattattgtaagtttttaagcagtta

SEQ ID NO: 131 - DNA, 725 bp, Arabidopsis thaliana
tcttcagcttcacttgatttacgaccaaaggttatttgcacgaatctctctacgaaagagcggtttgagtttcagaagaagagtgtgaggaaagaaaggatcaatgttaggttttatagcttgaaggctaaggcacaaggatcgtcaattgaagggattagtgttgtacaagagaaagagcttaacaacaaaaccgattatggagttgttggggttcatcatgtcggtctgctctgcgagaacctagaacggtcactcgagttttaccagaacattttaggccttgagatcaacgaagcaaggcctcacgacaagcttccatatagaggagcatggttatgggtaggttcagaaatgattcatcttatggagcttccaaatccagatccattaacaggtagacccgagcacggaggccgggatcgacacgcttgtattgcaatccgtgatgtttcaaatctgaaagagatcttagacaaagctggaattgcatatacaatgagtaagtcagggaggccagcgatatttactcgtgatccagacgcaaacgctcttgagttcacccaagtttgatttgagtctatttgtagatgaatcctctaaactttcacttgattatcagttgtaaatgctcttcatatagaactgcaaaaagcaaaccaaatccttgttgacttattatataataccacaatacatattcacagaaaaaaaaaaaaaaaaag

SEQ ID NO: 132 - DNA, 724 bp, Arabidopsis thaliana
ctttttttttttttttttttgaaaaaagcttcttctatcgattcaacattgaattataattttacagacacaatattcttcatctaccacccacaggattttcatttcatcccaattgtattcccccacgcgaccccaaactctaaatacgtacattgacatacacttacgtgtacaagaatacgtatagaagtagcttctattggttaacctctcgagctgcaaatcaaaggtgatctgaagtgacgcccgttcttctcctgtcactgctgctgggcttaggtcgttgggaaggacacgggcttgggatagcctccagagtggaacgaggagacagacggttcacggttcctgttagatcgggagaccggtactgttgttgctgctgctgttgcccactttcactctctgaggatgtcatgtttctagctcgcgggacctggtctagtttgaaatttggcttctcccttctactgcttggttccgttatgttcatcccattaaataattgagagacatcactgttgcttggtgaggttggttgcaaagagttctttaggaaccggtgttctagcaacatagatgcggttggtcgctcagctgggtttctctggaagcataatctcaggaagtctttaccctcaggtgacattgattcaggtatcggtgggctatctctcatgaccttgaacatagctgcagccccttcaaactcactccaagg

SEQ ID NO: 133 - DNA, 724 bp, Arabidopsis thaliana
gccccatccaccaccgtgcgagttacaatcgtccaatcctccaccgtctacaacgatactcccgccactctagaaaaggcgaacaagtttattgtggaggctgcaagcaagggatcggagctggttgtgttcccggaggcgtttatcggtggttatcctcgaggttttaggtttggtttaggggtcggagttcataacgaagaagggcgtgatgagttccgcaagtaccatgcttctgctattaaagttcctggccctgaagtagaaaagttggcggagttggccgggaagaacaatgtgtacttggtaatgggagcgatagagaaggatgggtatacactctattgcacagcacttttcttcagtccacaaggtcagttcttgggtaagcaccgtaaactcatgcccacaagtttggaacgttgcatttggggtcaaggagacggatcaaccatccccgtttacgacactccgattggaaaactcggtgctgctatttgctgggagaataggatgcccctctacagaaccgcattgtacgccaaaggcattgagctttattgtgcacctactgctgatggttcgaaagaatggcaatcgtcgatgcttcacattgcgatcgaaggtggatgtttcgtattgtcggcttgccagttctgccttcgtaaagatttccctgatcatcctgactacttgtttaccgattggtacctcggccgcgacc

SEQ ID NO: 134 - DNA, 723 bp, Arabidopsis thaliana
cagctgctgcagcattcttccttttcgctttagccgtcttctccaacttggagctctcagcttcttcacttgtcagtggcaagatctcttgccttgactgccaccgcgatttcgacttctcaggcattaaggtcctccttaaatgcgacggagagaagaaacaaataaccgcgatggcagctgcagacggatctttccggtcagtgcttccaacggctgacaaaaaaggctccataaattgtcttgcaaagctcttgggaggccctgagcaactctatgctcacaaacacaacttggtctctgaattggtcaagtctaaacacgattccaaagttttaactacctcaaacccacttgccttctctctctcctgccccaaaccatcccgagatgatatcggaagtatgatcggagattccaagactattaattttccgggggcaggaggttttggattcccacctgccagcttctttcccttcttaccaatcattggtatcccatgatttaaataagtgttacttttaagtccttaaagacatatgtatacatatgttttgttgtttacgtgaatgaagccagccaagacaagacacaaatatttagcaaattacattactttgtttagtgagatataaggtttgtttatgtgctaagaaaatgttatttattggctttatgtagtttaaatcagttgcttttgtatcaagtttgtaataagaa

SEQ ID NO: 135 - DNA, 723 bp, Arabidopsis thaliana
cctaaccctaattattcattattcctgagattcatcggcgatgagttcggaggaagccaaggtcgttgttccgaggaactttagattgttggaagagcttgaaagaggtgagaaaggtattggagatggtactgttagctatggaatggatgatgctgatgatatttatatgcaatcttggactggcaccattcttggtcctcctaatactgcatatgaagggaaaatctttcagctgaagcttttctgtggtaaggagtaccctgaaagtccaccgactgtgaggttccagacccggataaacatggcttgtgttaacccagaaactggagtggttgaaccgagtctcttccctatgctcactaactggcggcgagaatatacaatggaggacatactggttaagctgaaaaaagaaatgatgacttcgcataaccggaagttagctcaacccccggaaggtaacgaggaagctagggcagatccaaaaggaccagctaaatgttgtgtgatgaagagaggttggtgggaatcagctatttgtattaatagaaggaacagtgtatataaaacatcatttgaagctttgaaattccctacaacttcctaatgttatagtcttgtttgagaatatatatatgtccgccaaaaacagttgatgattattttaataaacctcatctctactttctcttaaaaaaaaaaaaaaaaaaaaaaaaaaaa

SEQ ID NO: 136 - DNA, 723 bp, Arabidopsis thaliana
tcttttgccgctggttcatcaaaggccgaaaatcatgctcaactgagcccttatctttcttacatcagtggggcactagcagggtgtgcagcaacagttggatcgtatccgtttgacctattgcggactgtattggcgtcccagggtgagccaaaggtgtatccaaatatgaggtcagcatttctgagtatagtgcaaactcgtggaatcaaagggttgtatgcaggattgtcccctactctgatcgagatcattccttatgctggtctgcagtttggcacctatgacacatttaaacgctggagtatggtatataataagcgataccgatcttcttcatcaagctcaacgaatccaagtgatagtctttctagctttcagcttttcctttgcggtttagcttcgggcactgtttctaaactagtctgtcatccgcttgatgttgtcaagaaaagattccaggtcgaaggtctgcaacgtcacccaaaatatggagcccgagtagagctgaatgcttacaagaacatgtttgacggtttagggcagatattaagatctgaaggttggcacgggctttataaaggcattgttccatcaaccattaaagctgcacctgctggtgctgtaacatttgtggcctatgaacttgcatccgattggtttgaggcaaatttgacctgaacttgtaaaattcttcaattctatttgtaaatcttattctaa

SEQ ID NO: 137 - DNA, 723 bp, Arabidopsis thaliana
  misc_feature (1)...(723): n = A,T,C or G
ttttttttttttttttttacaaatgtgaaagtgatagaacaaaggagtgcattacacaatttgctagtgacttgagagacaaacacacaaagtaagccacaacatctataaaatggtcacacacatgttgctgaatttttggccacgatgttttaaacgacggaggttgtggtggcggtggtggagaagtttttagaattgattaagaggcgggaaatagagacggcggacacgaggagcattagaatgactccggcgaatgctgcgatgattgctcctgcgccgtgatcacagtaagtggtgaacctgtcgcagactttgttccacttggcgtgcttgtttccgttcttccctagctctgccacgaacaccgccgcgtttgcagccgcagatactagtgttgcgtttagcatgtcaagaatggcgatagagaggagacgaagacctttgtactccagtttccggctgaaaatctgaaccacaatcatcaacaagttgtggaagctcaccattacattagctataacaaagaacacaaaagccggtgtgtgctgaaacttagcggttaaagtggctttaataggaacagtaccaatggtggccacaaccaaggtctttgtctctttgtttagtgacattacaatggctgcagcnaaagtagccatgaatgcaaatattctcagccccaagagtagtttccagctctttgtggtaccaccagcc

SEQ ID NO: 138 - DNA, 723 bp, Arabidopsis thaliana
ccacgcgtccgaaccgtttatgatcaacgtcactgtgaccacaaccgccaacctcccaggtctaaacacagtgggccttacaatggccaggctagacttcggaggctctggtgttgtcccaccgcacgtgcacccacgcgcctccgaagtgacagtctgcctcgacggtgtccttctcgtcgggttcgtggatacgtcgggtcgggtctttacgcaggagcttcatccgggtgagacattcgtgtttcccaaaggtttgatccattttctatataacattgatacggtgagctcagctttggcagtctctgggctgagtagtcagaatcctgggactcagattgtatctttgtcgtctttcatttcaaagcctccgtttctggtagaggttttgaagagtgcttatgatatcaacggccaggatgttgctaggatccgcaaaagtcttgaaggctaaaaatgctaaaagcctaaaactatatataactacatggccaaccaataactatatacaaatgtatatgactaactcaaaactatattatgacaacaacaaaaaaaaacgtataaacaataaaatgtcactaaaaaaggctatacactcaattccgaattgagtttttctgcaattctttagctatcttgttaactatgaatgtttttggaatgtgaacgatttatgatccatagaactatgtaaagagcattaaattaaaaaaaaaa

SEQ ID NO: 139 - DNA, 723 bp, Arabidopsis thaliana
gcggccgcccgggcaggtccgggcaggtcgctaaagtcatcgtcgtcgtctcttctctcaaaatcaaaaaggttgttataaaaatggctgaggcaacgtctgctttgaggaagcctgtgttcacaaaggttaatgagttgagaccaggaaccaatggccactctctgaatgtgaaagttgtcaacacgaagatggtgatgcagagaggaggaggtcgtcccatgggtcctcagtcacgtcagatgcggattgccgaatgcttagttggtgatgagactggaatcataatctttactgcaagaaatgaccaagtggatatgatgaaagaaggcagtgtagtgactctgcgtaatgcgaagatcgacatgtacaagggttctatgaggcttgcagttgatagatggggacgtgttgaagttgcagaggagcccacagacatcaccgtgaaggatgataacaatctttcgctgatcgagtatgagcttgtgagcgtcgaaacttgatatggttcctccacaaacgaaaacagagcgactcaaaaaaagacttacgttctagttggagaaagcctctttggtttgggtttgagtcttttttatgtactatccggcttgcctctgatctactgttcttgttttgaaaatcaggttgccgtctttttgtagattgattctctatttaaatatcatgggatgatctttctcttgttttagtttttgttct

SEQ ID NO: 140 - DNA, 723 bp, Arabidopsis thaliana
ttttttttttttttaatgaaaggtagaagtggggtttgattttagatatcaaaaccgaatattcttttattcctcacacacacataggaacacacctgaatggtgcatcacacgggataacaacaacacacattcaacacaaacatgacgaaattaaagacaataaaccaaactaaaccggaaacaaagtaaacacggaacataaacatataagagctatagtaatcataatctgctgattccgaggggaaccgaagcttgccaaaggatcgaagttgcccaaacgagggataacaaaagacacatcaagcttgtcttcatcaaccttcatgcaatcttcatcgctccattcacacacaatcctcatcatcatcatcatcaccatattgataattatgatattggataatgatgatgatgatgatgatgatcatttacacaacacccacacacgaacattcacaatcataatctccaagagatctcttcttcttcttaccttttgtgagtactcttgtgtttggggccatcccataaagagaaacttgaacctctcaaaaccctttattggtgagatcttctgatagattcagagggttcttgagcttcagtttctttaggggatggccatattttgtgtgtttggtgttgtgccaaagagagtttcaacaatggatgttgttagggtttttatggcttctctctttgtctttggcggacgcg

SEQ ID NO: 141 - DNA, 723 bp, Arabidopsis thaliana
  misc_feature (1)...(723): n = A,T,C or G
aaaacttttttctttcatcctctaaaaaaaaatctttctagtgagtaacgaaaaaaatgtgtccggtggagaacaaatggttaaaggtgggtcaaaaaggagctggtcctggggctagaagctcacatgccatgaccgtcgttgggaacaaagtttactgttttggtggtgagcttaagncaacgatccatattgataacgatctttacgttttcgatcttgggactcaagaatggtcgatagctcctgcgaccggagaggctcctttcccctgttttggtgtctcgatggtaacgatcggttcaacgatctatgtctacggtggccgtgacgataaacggagatacaacggtcttcattcgtatgatactgagaccaatgagtggaaattgttatctccggttgaggaagggcttcctggtcgtagctatcattcaatggctggtgatgatcggaaagtttatgtgtttggtggtgtgactgctaaaggacgtgtgaatacgcttcatgcgtacgatgttgttgatcagaaatgggttgagtatccggcggctggggaagcttgtaaaggcagaggagcaccagggcttgtggttgtggaagggaggatttgggttttgtttgggtttgatggtaatgaattgggtgatattcattgttttgacttggctagtgaacagtggaaggctgtggagactaccggggatgtacctcggccgcgac

SEQ ID NO: 142 - DNA, 722 bp, Arabidopsis thaliana
gcggaattaccggcgacagaggcggagaaacaaccacacaagctcgaaagaaagtggagtttctggttcgataaccaatcaaagaaaggcgccgcctggggagcttctcttcgtaaagcctatactttcgacaccgtcgaagatttttggggattgcacgagactatatttcagactagcaaattgacagcgaatgctgaaattcacttgttcaaagctggtgttgagccaaagtgggaagatccagagtgtgctaatggaggaaagtggacttgggttgttactgctaataggaaggaagctttagacaaaggctggcttgaaactttgatggctttgattggagagcaatttgatgaagcagatgagatttgtggtgtggttgctagtgtccgtccacagtcgaagcaagacaagctctccttgtggactaggacgaagtctaatgaagctgttctgatgggtattgggaagaagtggaaggagatacttgatgtcaccgacaagataactttcaataaccatgatgattccagaagaagccggttcactgtctgaagaaacgagtgtgaagccagaggaagatgcaatatggctttttttgtgatactgtttggtcggtttactcaaatagctgagacatttagggacattcactttgaggtgtaaactctacaaagttttctgtttcattaaaatgattttttgttataaattagcgg

SEQ ID NO: 143 - DNA, 722 bp, Arabidopsis thaliana
  misc_feature (1)...(722): n = A,T,C or G
ccacgcgtccgaagctccgtcagagattattcgctattcacgacgaagagaggagatacgttgtttagtcagtcatggtcacctctttccccaaatcacaggggacttattgttctgctacatggattaaacgagcatagtggcaggtatagtgattttgcaaagcagcttaatgctaatgggttcaaggtctatggaattgactggatcggtcatggcggaagtgatggacttcatgctnacgttccttcccttgattacgctgtcacagatttgaaatcatttcttgaaaaggtattcacagagaatccaggactcccctgtttctgctttggacactcaacaggtggagcaatcatcctcaaggctatgctggatccaaagattgaatctcgagtttcaggcattgcattgacttcaccagctgttggagtccaaccatcccatccaatcttcgctgttcttgctccaatcatggcgtttctactaccnaggtaccaaatcagtgcagcaaacaagaaaggaatgccggtttctcgtgacccagcagctctcatcgccaaatactctgacccattagtcttcaccggatccatccgggttaaaaccggctacgagatccttagaatcactgctcacttgcaacagaacctgaacaaagtgaaagttccctttcttgtgatgcacggtacctgcccgggcggccgctcgacgcgccaaaa

SEQ ID NO: 144 - DNA, 722 bp, Arabidopsis thaliana
  misc_feature (1)...(722): n = A,T,C or G
aatgggcgatggcaaatttattaaaaaaacctgaagtgttgaaaaaggcaaaagctgagatagacgagaagattggagaagagagattggtcgatgaacctgacattgcgaatctaccttatctccaaaacatagtttccgagacttttcggttgtgtccagctgcaccacttcttgttccacgttctccatctgaagatctcaagattggtggatacgacataccacgtggcactatcgtgctagtgaacgcttgggccatccatagagacccaagactttgggatgagcccgagaagtttatgcctgagcggttcgaagaccaagaagcttcaaagaaactaatggtgtttggtaacggacgaagaacgtgtcctggtgcgactttaggccagaggatggtattgttggctttaggttcgttgattcaatgctttgactgggaaaaagtcaacggtgaagatgttgacatgacagagaatcctggaatggctatgcgtaaactcgtgcaattacgagccgtttgnnntaaacgtcccattatgactaatctcttggcttaaatatcacattttattgaccaccattttgaagtttaccggtttaagcatttttttgggtttagattttttatatataaatacatgattgttttgaagtttggaaattttaataatgtaagattccatgaaaaatgttgtaatataaaattcgaatcatga

SEQ ID NO: 145 - DNA, 722 bp, Arabidopsis thaliana
gaaactagggtacgaatcaagtgttcttttacctattggtagatacacaactacgtacgtttcatatccaaaagcaaaagtagcaagctttatccaacccagcagacctaaaacatgttctcttactgaaattcatagatgatagtaacttcccttagtccctctcttcttctcttccaaagtatcctcccacacactcgttttcttgcaaaatcactcactcagctcctgcttctgcgtctttctttcagtccatttccattagcatatggcacttcctcacgcgctctgtatggaggtggtgatctactgtagctgcggccacgggcaggaggaggagaaggactgcggcgccttggaggagggggagatcttgcacgagggctgtaactcctccgtccatagcttgggctccttctgtatcttggaggagtgcgactacggctcttgctgcgacgccttccagttccaccacggttacggcattcacgtgcgaaatgaccagtctcaccgcattcatagcatttcaaatcagagccaccacgaccaccacggccgccgccaccacctccacggtcaccaccacgaccgccgccaccacgctcacctcgattgtgagactgttcaaccctccagccattcttgccatctaaagcacggatagcatcacgggcatccctaggatcttcgaaatctagaaaagcgtaaccaggtggtctacg

SEQ ID NO: 146 - DNA, 722 bp, Arabidopsis thaliana
tttttttttaaaccaacaccgttatattagcttcagagtacaaatagtgtatttaaagtgacatgaagaaacattacctacttattattacatatgtacttgttatatgcttctttcttatacaagtatatggtgaaaagtctgtacagcttgggtattgaaagtggtgcaggtgaattatgtgttctttactccgaagctcctggttctttctctgttgattcaacatttgtcttgtccaagcttatgcgcgagaaatgagacttgaggccaatccaacactggtagtagtcgtgatccaggaaaggagactccagagcccaatgacagactctagggatcaatgctgattcgaacatgaaagccatcgtacctgtgagtttagaaggagccattgcatttactcgagcaattgtcgcctcgtacgtggtagtatctggaccatgaggtgtcatacagctatgaagacttgcaccgccagggagaaatccatcagctttcgcctcgtatgcaccgtagattaagcccataaattcactcatgcagttacgatgatagtaaggaggtcgaaaagtatgctcagcaaccaaccatcgaggaggaaatatgacaaaatcaagcaaggccacaccaggtttatcagttggtgctgtaaggactgtatttatagatggatctccatgatctaaaagcacagtgttgtatggacagaacttcttcag

SEQ ID NO: 147 - DNA, 721 bp, Arabidopsis thaliana
ttttttttttttttttttttttttttttttttttaaaaccacaataaaatcaatttcttataaaacgaccccgaaatttaggattcaccattcacaacccagaaaccttataaaatatcaacatcaacaaatcttagtcaaattttctcactttggtagcttctcttactctctgtatacattgaaagtagcatatgtatatatactttcttttgaccatgagtgaagcttctcttagactagtttaccactaaagggcaaagacggcgaatcgtccccactgattatgctaggagccggagtatttctcctcgactgacgtttggtgggaacaataatggcttcatcctcaaacttcccgagcttgtcatcaatgtcataatcgtcttcatcgcctttgaaaaccggatgaacgtaagcattttgcaagtagcctttaaggttcaggtttggttctcttgcggtttctaatgtatctttcatcatagcttcctgtaaagggtatctgatgaaagctggctcataacgacctttgcagaagtggtggaaaccaatggtaagcacaggcaaagcaatgagaaacggtgcagctaatgcagcgtgctttgttcccaatagacccatcagaagcaactgtgatattaccaatgctgctatgactcgtccatgaacgtctggccaaaacgctgcagcactctcgtattcttgatcggacgcgtgg

SEQ ID NO: 148 - DNA, 721 bp, Arabidopsis thaliana
ccacgcgtccggttttcattttcgattaggttaatcgtatctgggttccaccggactcaacccctaaaatcgccggtaaattctccgagcgtcttcatctccgtacctaaattcttcaactctgagtcaaaatcgacgggaactggttcaagatccgtagcaatgagcagcgttgagaaaaccgggtcggattctggagcaatagagaatcgagcgagcaggatgagagagaagcttcaaaaagagctcgaaccagtggagttagtgatcgaagatgtttcgtatcagcacgctggtcacgccggaatgaaaggtagaaccgacgatgagacgcatttcaatgtgaagatcgtttctaaaggattcgagggaatgaatttggtgaagagacacaggttggtctatcatttgctccgggaagagttggatactggattgcacgctctttctatcgtctccaagacgccgtctgagtctccttctaaagactagtgtactggtactgtttaatgtatcttctgtttctgttatcagagtttctcatcaaactctgttcgattcaaagattgaatttttaccatcaaagtgctctgttttggaatttattgcggagccaaagtcttcatttttacatacgcttgaggttgtgtgttggtgtttctggaattgtgtgttggaacaaagacacttgcttttagttcaattcgagttctgtcttaaa

SEQ ID NO: 149 - DNA, 721 bp, Arabidopsis thaliana
ttttttttttagagcaaacacataagcattctttctcttgaccaaagttaaaaacacacaacatttgaaacatgacaaactagatgtacttgaagagcaaatggaggatctaacttccgaagacagcgacttcgagattcttggcggagtcaacaatggaaggaggatcaaagcgagtaaagagcttataagaggagattagagagagaacgatgtagaaacaaaccacaaagaatgtgattataacagaagcagtggctctatgacagaaaccgccataggagctacatgcatcgctccaagtaatggctgagtctccattgtaagccaagtatagaacctcagctgatacagctccagcagcaagaaccaggtaggtcagaagctggtcgagacaaaagaaggtccaaacacgaggcattgtcgaagaagaacgaggcatcgctgcaatggctgctgatagaagagagtagcctgcacatattccatttgcgtgcaccaagtacctaaaggctgtgagattggagtaagaaattgaaccgaactcattagtctcagagtccttaagcatgacaacaagtgctgcaacacaaaggcccaccggagctaaccggagcattgtctcggcagttcggattccgaggctagtctcctcccacttctccgtggcaccaccaccggagccgccgtggctagccttgtcatgatcattacttttctc

SEQ ID NO: 150 - DNA, 721 bp, Arabidopsis thaliana
ccacgcgtccggatggtgattggcttccatggatccgctgggaaagtcctaaactccattggagcatatttaacaacagctcctcctactaagtcacaacttgtaggtggtctaaccggaggcgaaccttgggatgatggtcctaattatgatggcgtgaaaaagatatatgtcacttacattagcactcttataaggagtatcaatgtggactatgaaaaggacggccaagttgtaacacgttaccacgggatgaagaatggagatacagaggagtttgtgatagactatccaaatgaatatttgatatcagtggagggaacctacaacatactccccgatgataacgttttggtcattaggtcgttgattttcaaaacatcaaaagggagaatctctcccacatatgggtttgtgtcaggtaccaaatttgtgttggagagccaaggtaatgctattgttggattctatgggcgggatggtggtgctttcgacgctatcggggtttatttctctccaattccttcgtaattcgaaactataaaggctataaaaccatatggttagatggaaatatagtcacgaactccatcttgttttaaggctctcatatctacaatgatttactacctactccgatgtttcttaaatcagtaatttatttcgagtttgcaatctcttgtaataaaacaaggtttaattatgaaacctgtatttcagt

SEQ ID NO: 151 - DNA, 721 bp, Arabidopsis thaliana
ccacgcgtccgaaaagaaaggagagaggccgacttggggtataagccagagttcttcttctttttcaagcttcttcttctcatcagtcatcaccggaatctaatttatactcgcaaaactcagcgattcgtttcgtttctgacaagtttccaattctacagcaatggatctcaatctcgatgcacctcactccatgggaacgaccatcatcggcgtcacttacaatggaggtgtcgtcctcggagccgactcacgtaccagcaccggtatgtacgtagcgaatcgagcttctgataagattacacaactgacagataatgtctacgtctgccgctctggatcggctgctgattctcaagttgtatctgactatgtccgctacttccttcaccagcatacaattcagcatggacaacccgcaactgttaaggtttctgccaaccttatcaggatgctcgcatataataacaagaacatgctccaaactggtctcatcgttggaggatgggataaatatgagggtgggaagatctacgggatcccactcggtggaactgtagtcgagcaaccgtttgccattggaggctctggttcgagctatctctacgggttcttcgaccaggcttggaaagataacatgaccaaagaagaagcagagcaacttgttgtgaaggcggtttcactagccatcgcccgtgatggagccagtggtggtgtcgta

SEQ ID NO: 152 - DNA, 720 bp, Arabidopsis thaliana
  misc_feature (1)...(720): n = A,T,C or G
tctctctctctcgcctctataaaaccattctttctctatctcagccactctcattacccattgtagaaaagannnaaaaagcaaagaacacttgaacgttttctagatagagatggaagggaaagaagaggatgttcgagtgggagctaacaagttcccggagaggcaaccgataggtacatcggctcagacggacaaagactacaaggagccaccaccagctccatttttcgagccaggcgagctgagttcgtggtccttctacagagccggaatcgccgagttcatagccaccttcctgtttctatacataacagtattgacagtgatgggagtgaagagagcaccaaacatgtgtgcctctgttggaatccaaggcattgcttgggctttcggtggcatgatctttgcccttgtctactgtacctcggccgcgaccggcgcgccagatcgagcggccgcccgggcaggtaatggaaacggaaggaagaagacgagaagtggttgtttcatctctccaattcgcttgctccgacgatatctccaccaatgtcgccgccgctgagcgattagtcagagaagctcacgctaaaggagctaatatcattcttattcaggaactttttgaaggatattacttctgtcaagcacaaagagaagacttctttaagcgagccaagccttacaagaaccatcctaccattgcaaggatgcagaagc

SEQ ID NO: 153 - DNA, 720 bp, Arabidopsis thaliana
tttttttgcacaatttgaatctgaatatttatgactggtctttaacgtgagtgtgcttgcacaatttaaatctaaatatttatgactggtctttacggtaaatgtattcagtagtaaatactaatttacgacaatgaagccatatgaatctttctatgacaacaatattatttgattaaatgggcgacctagactcgttgatcttcgttgttcatccgagaagacaatgtagttatgtctgcttccgtttctttgttcttaccccacaagaacacgtagagacctattattgtccctactgatccaatcacacttccgaggtataaaggagtgtgtaagataaggaaatcgaatagagtagccgatatgagagaaactggcataattgctgatgcgaaaacagctcctaatctgtttattccccatgtcgctgctacagtcgacattgcttgtcctatcactccagcatatattatgacaccaatcacaaatccatcgtcgatgatccaatgtttaaggtctctactcttgtaaagactcaatagagcacattgaaaagctgcgaaaattgacatgagacaagtgcttgagaatttgcaaggatacttgatgcttaaagtcccttgaaacaatatccatagagatagcaacacgattcctatgactaagtagagacatccaagaagccaattcttggtgttgtgatcgccggacgcgtgg

SEQ ID NO: 154 - DNA, 720 bp, Arabidopsis thaliana
  misc_feature (1)...(720): n = A,T,C or G
ctacactccatttctctttcttcttgactcgaccatcgtttctctaatctccgcaactatggcttcatttacgaaaacggttttgatccctattgcgcacggtacggagcctctagaagcggtggcgatgattaccgtgttgcgtcgaggtggtgctgacgtgacggtggcgtctgttgagactcnnnttggcgttgatgcttgtcatggcatcaagatggtcgctgatactcttctctctgatattaccgactctgttttcgaccttattgtgctccccggagggcttcccggtggcgagactcttaaaaactgtaaatctttagagaacatggtcaagaaacaagactctgatggccgacttaacgcagctatatgtnnnnctcctgccttnnctcttggtacttggggtctactagaaggcaagaaagcaacgggttaccctgtttttatggagaaacttgcggctacttgtgcaactgctgttgagtcaagagtgcaaattgatggaagaatagtgaccagtcgtggaccaggaaccaccattgaattctccatcacgcttatagagcagttgtttgggaaagaaaaagctgatgaagtctccagtatcttgctgcttcgtcctaaccctggtgaggagtttacttttactgagcttaaccaaacaaactggtcatttgaagatacaccacagattctcgtacctcggccgcgacc

SEQ ID NO: 155 - DNA, 720 bp, Arabidopsis thaliana
  misc_feature (1)...(720): n = A,T,C or G
tttttttttttttttgagacgaaactccatcagaccataacagattatagaattgagaaagtgcaaactcgtagtatctacatttccacgtgtgagccgatcgaatcaaaaggcattaaaaatgcaatgtactaannnnnnnnttttttgcctgtgaattacattttcctttacagtaactttaaagtgaatgatttttcactttcatccttgaagaaatatggcaaccattgcgagtactagtgaatgatcgatggatccaggaaatatcgttaaccggaacttgcttctccctacgtaaatctgtctcagcttgtacatcaaactcgtctgtgcaacaatggaatcttgactataaatggtacatgatttctgaaagggaacacctttgataacaagattttcggacgattctccagcaaaagagacctctgactctgtcttactgaatcttttcgatgtccgcttcaccgttagaaccaaatccttacgcttttccacatctcctttatgtaattcccacactccattgtggagacgagagatggagaagagaggaactccggaggaatcaaggagagatttcaaggaggaagaagatttgcggaggatgaagacgagatgttcggaagaatcggcaaatccgagatcgccggaggaaagtccgggaagctttttggaagcgaagagatcgactggtatacgccggagatcctcagg

SEQ ID NO: 156 - DNA, 720 bp, Arabidopsis thaliana
accaccatcgacgtcggcgagccaagcactgttaccaaaagttcaagccatgtcgtaaaggacgcgaagaagaagggctttgtggcagtcgcctcaagaggtggtgccaagagaggtttggctatattcgatttcctcctccgtttggcggccatagcagtcactattggggctgcctctgtcatgtacaccgccgaggaaactcttcccttctttactcagttcctccagttccaagccggttacgatgaccttcctgcgtttcagtactttgtgatagccgtagccgtagtcgctagctatctcgtcctttcacttccattctccatcgtatccattgtccgtccacatgctgtcgcgccccggctgatcctcctcatttgcgatactctggtcgtgacgctcaacacatcagcagcagcagcggcagcatcaatcacctaccttgcacacaacggcaaccaaagcaccaactggctccctatctgtcagcagtttggagacttctgccagaacgttagcaccgcggttgtggctgattctatcgcgattctcttcttcatcgttcttatcatcatctcagccatcgccctcaagaggcattgatttcatctttaagtgtcaagatcgtaatgtacttgttgtatatgtttgtggctttgtgtaacatgagaattggtattattgtgtgaaaatgtaattgaagttgttttatgtttt

SEQ ID NO: 157 - DNA, 720 bp, Arabidopsis thaliana
ctttttttttttttttttaaagctaaagattcgccatttttatttctttattgtgggctactcgccaagcaatctacactcaacagacactaataaggataaaaaaacttcgcaacagaatcagatatctaaaaatcccggaaattcactagatttcttcgattggtaccgagaggtgtcatcaaatttaacagacttcaagtttattaggccaagcccacgagcttctcactgatctcccacactttacgagccttctcaacgtcacttgcttcttctgataactggttctcaaaagaagccgaagcattgttccagctccaataaacccctgatttcgtcaagcttggatcactcaccacctgagcaagtcttttgcctgactctgtttcggagacatatcctttagtgatgtacttctgaaagggagggaagagggcacggaagagaggaatgtgctctcggaataaacctgtggaggcgatgcaaccggggtaaagcgaagcgaaagtgactccagtttcttcatggaaacgcctgtgaaactcttgcattgtcaacatattgcagactttactgtctttgtaagcctttgcaccgtcgaaatctcctccatcaatcatagctgagctgtttaaaccgtttaatccgccggctaaacccctcaaatcaccgagattcgccttcggtggtacattacccgccaatgtattcgtgttc

SEQ ID NO: 158 - DNA, 719 bp, Arabidopsis thaliana
tttttttttttttttttttttttttttttttttttttttttttcttaaaacatattttgtcattaacaatgtttaaatgggacacaaaagaaacaatgacaatttacaaaacaacaaaaccctaaatccccaaactcattatcaaatcgtgttgatcagattccactgtaatcaccacgagcaccgtcgttaccaccgccagaggtagagagcatcggtccataaggtgattccagatcgtcactcacaagatcatccgttcctcttaacgcagcgtgtaagatcaaaaccagaacaccaaatccaacggtggtgagagctctgagccaaactccggtggtaactagcgacccaatcgaaagaccaatgagaagcacagcgacgatgccgtcatcaatagtgaatccgaagatcgtgagtggctcctcgcgagcgaagtagaggaagaaccaagctaagccaacggctataaacgcgaggatggcgattggacgtgtgattagggttagacctaggaggatagagagaatgatactgtagttgatgcggaagtgagtcaggttctgagttacgcgagttgttgcatcggcgatggaggaagggaagctgaaggcggaaagatcgaggaaatcgccccatggacgagccgctccagtaattgactgagctgtttctttgattccggtgatcacttgattcgccattgccgattggatctc

SEQ ID NO: 159 - DNA, 719 bp, Arabidopsis thaliana
ttttttggtaaaaaaggctaatgatttcatcactttgttggcacgagacagagaaaaacagagtaaatattgatacagttgattataacaagtactagagaaatctatttgagacactactactaggagaattcttcgatattattacttaacctagaaatctcctaataactttttttttctgcataaacttatttatacaaagtcttggttaagtagatattagtacttggcttgagcttcaggtgttcctggagagatttacaaagaaactaaaggaagtggttctttagtaataaagagaaccttgccaccagtttcctcttgaaacatcttgcgggttctgtccattagcgtcatcttctccgcttcttctacggtcatttttaactggagggtaagtttggttggtggtggatcgagcgtatacgtcttgaccaccgtagtaaagagaagagcttagatgacatggctcaactctgtcttcttgagcatttaaagattctctacgttgagcttgtgagccatgtttggagtttgaaccatctcttgcagaacccttggagggatgagggaacatggtggagaagatgccggaggatgaagatggtggcgaaggatctttggaaccgaagagttcggctgtaaaagaagaagaagtagaagaagatgagccaactcgtcctttaccctccatttagtaacttctaaaaactcac

SEQ ID NO: 160 - DNA, 719 bp, Arabidopsis thaliana
  misc_feature (1)...(719): n = A,T,C or G
actactacgacaatggactacgaatacggaggaggagagtactgcaggagaggacacgtgccagcttttggaagctgggattggaacgacgccgttccattcactcagtgtttcgagacagcaacaactcaacaaccagcttttcttcattatgcttcttaccctcaagatcgtgatctttacctcgccggtgatctctacgacaaccaccaccttgtagctccggccgttatcattgtccctcgtcgccgggctaaagtgggtcaagaaccagcggagaagaagagaaatgtctcgaagcagcaacacaactataagacggaggcgcgtgagtttaacgcgccggtaagctgtccaacaccggttgtgaagcggaggatgaaggcaccaaagcctgtggatgaagacttgtacaaagtttccccacaacttctctcagtcaaatccaaaaggaaaagaggaggaggtgggtttgggtgcatttcaaggtgttttttgccaacacgggtgctttgaagaaacaagcgtgaaagacttgagtcagaagaacactttgttttnttttcttttctttttctaatcctattatatatatcaaaagactatgcttgtgagagtatgtatttatgaatgcgtaggaaaaaaaagatgaatgctaaaagatagtagaccaatgtagcttttgggaaaagtttagctatattatattaattaaacta

SEQ ID NO: 161 - DNA, 719 bp, Arabidopsis thaliana
ccacgcgtccgatgcaagaaactcagacgatttgcattctatctgagacaaggcggcttaaccgacttgggcttaagctacatcggacagtacagtccaaacgtgagatggatgctgctgggttacgtaggtgaatcagatgaaggtttaatggaattctcaagaggctgtccaaatctacagaagctagagatgagaggttgttgcttcagtgagcgagcaatcgctgcagcggttacaaaattgccttcactgagatacttgtgggtacaaggttacagagcatcgatgacgggacaagatctaatgcagatggctagaccgtactggaacatcgagctgattccatcaagaagagtcccggaagtgaatcaacaaggagagataagagagatggagcatccggctcatatattggcttactactctctggctggccagagaacagattgtccaacaactgttagagtcctgaaggagccaatatgatatgacccaaaaaacaggtttgtatataaagatttttagtctcgagttttggggtttccacaaactgtgtactatactactttggttctttttttgtttcatgttgtgtcgtcgatgtttttgggagattacatagagtcagtcttgtttgttgtatggtcattacttctttatttttcctcaggggtctgtttactttaatttctttaataaaaccccgaagattttga

SEQ ID NO: 162 - DNA, 719 bp, Arabidopsis thaliana
ccacgcgtccgtttgatttttcaggttaaaggtagattttcgtagcgatgttggcatttctgttttaagcctaaggccctgtcttttgttatagatattcaagcttataaaagggaaaaggttcaggtttactaaatggattctttcccctttatctctgttggtgttatctctcatgctacatctatattagtgatggcttgtttttatgtatgtgaagtgctccgctcccctatataggtatgttgaggatgcaaaggtggcaagttctactttgatctatttttctcgaaattttcatctacagtcctcttttcattggagatgtctctatttctggttctatgctctgcattttcctatggtttaaatgctaatcacttcggctcgagatctactctttctacatgaattcattatcttcatataggaatttggatgatgctaggacgattctgtttcgacctgttcgcctagatttattggcaacgagggatggatgtaatcagcttttcttcccttatctgttttccctttctggttatgtaatctgcatcttctctatgtggaagttctgtttcggcctgcttgcctacattgccctatatctgttacatcatgagtttatgagggatgaacttggaggttccatctctggttggattcaggtgttttgagctaatcttcttctgggtttacttctctaccatactttctac

SEQ ID NO: 163 - DNA, 719 bp, Arabidopsis thaliana
atcatcctttgtaatccgtccaattcgcctaagtcgcgggctcgtattaatagaaagatttttcttccttccctagagatcccattttcgtacttgtgtgattcgtgcatcaacagttggcgcgccaggtagggggatagctcgaagatatctctcaaaactacgacctgatatagcgttctagaaggtcaagctcacacatgtgaagtcagggatgttaagcaaagcacgtgtgttgtgagctggcgagctggcaatgtgaagtcagggatgttaagcaaagcacgtgttgtgagctggcgagctggaaatgtgaagtcagggatgttaagcaaattatgagccttggcacaggagcaacggaagaggatggagcaattgttgctaagttgtttggccagggatgttaagcaaagcacgtgtgtgttgtgagctggcgagatggcaatgtgaactcagggatgttaagcaaagcacgtgttttgagctggcgagctggcaatgcaaatggacgttaacggcgatcgttattaacgtggttaacgtttactttctttacctttttgtataagagcaacatgttatgctcatgctttcattatcgaataatctggttgtcatctctctctagagacttctagatttccctcatcgttttaccggagctctcgtcgagtctcttgtaggtgagaagttgatatcgcgtctcttagcggccg

SEQ ID NO: 164 - DNA, 718 bp, Arabidopsis thaliana
  misc_feature (1)...(718): n = A,T,C or G
agaaagctaaagaacttgctattctctgcgacgccgaggtctgtctcatcattttctccaacactgacaagctctatgactttgccagctccagtgtgaaatctactattgaacgattcaatacggctaagatggaggagcaagaactaatgaaccctgcatcagnngttaagttttggcagagagaggctgaaactctaaggcaagaattgcactcattgcaagaaaattatcggcaactaacgggagtggaattaaatggtttgagcgttaaggagttacaaaacatagagagtcaacttgaaatgagtttacgtggaattcgtatgaaaagggaacaaattttgaccaatgaaattaaagagctaaccagaaagaggaatcttgttcatcatgaaaacctcgaattgtcgagaaaagtacaaaggattcatcaagaaaatgtcgaactatacaagaaggcttatggaacgtcgaacacaaatggattgggacatcatgagctagtagatgcagtttatgaatcccatgcacaggttaggctgcagctaagccagcctgagcagtcccattataagacatcttcaaacagctaagatcatataagagatatataacaaattgagtaagtgtgagtgtaatcatgtcggagagcaaaccaaaggtttgatttgtacgatatatacttatatatggtctcaagtgaaagcaatggaac

SEQ ID NO: 165 - DNA, 718 bp, Arabidopsis thaliana
tttttttaagacaagttgtagtagtagactagtagtacatgaacgaacaagacaagaggagaaaacagttgatgagctttttcgtctctttctaaatcttttcttttattccctcttggatttggagagagctctctttcgctgaccaagcatgtacctgtacatgtgtgggctacctgggacatagattgcaaggacgagtatcgttgcatagaagaagtcaaatgagaagttcaatatgttaggcatcctaacgctgtacatctccgatgtcttgatgtgtggtaaggcaaggtagataagaccaacttcgctggtgataccggtagggtatagcaataaaaagctgctgtatctgagccacaagtgccatgaaggtgcaaagcctagagcttccttaaagccgaagaatgagtagcgaataatctctgtgatagaccagcttatgaccagcgacgtaacaagaaaatgagatcggacctctggaaaactgtataggatgccccaagtgagaaatagccttgaacctatctgtggcagagttgcagaaacaggagatctgaccaaacctactaatccatgaagaatctcgagaacggcggcagtctgagcaagctggagaggcttctcaatggcgtcatagacattctcataacccgtttccttcaacgtcgttatcgctaagtacaaaacctgagcccatccagcaaagacgatc

SEQ ID NO: 166 - DNA, 718 bp, Arabidopsis thaliana
cggccgcgaaaacgaataaatacaaagttttttttttttgtagatatacagagaccaactgctttaccatgcaattaacttcttgtcaatatgcaacatcctcatgcaagaactaaagcttatgcagaaaagtaatgaagcaaaacttgaatcttcaccttctgctgcgacgctggaggaatgctgtgatgtaacatgtactgagtatatatatgaagttccgtggaactactaatccttcaaaacaaaacaaaaactctcataggttaaggatcaaaatggggacgccttctcagtttctcactcaagtgacaggttccctagtcgaatgctgcgttgctgacgactgatttggtttcctaatggtacttgcgatgatcttaaatcccctggtttcccaccagagaatggcgaatcgagctttggttgaaaccagttcttcaaagaaacaccattgattcttaatcttgaatcctttctatgatatggtatatctaaccttctcaacaatgcaccaatttcctgtccgacccttcctgtaaggtcaattgtcttctctccttcaggagtcctaatttccttctcttgaatggaaatgatcaaattaatgtgaggtatcttcgcaccagcagcaaggcgatgcttaagacctttaaagatggttaacaggtaaacctcagcaacgtttttcggcaattctgtcgtgtcaaaaaatagt

SEQ ID NO: 167 - DNA, 718 bp, Arabidopsis thaliana
cttttttttttttttttttttaataccaaaggaagataatattataagattagtctatgtacattttaacaagtgaaaagaagatagtaatcacaattatttgagaaatgataaatattgagaacaaactatacacacaaattgaaagttgggaagaagcattaaaacgtggcggattctcagaggtcagagattagattgaagaagcaccgaatgtgttctcgccactgtaagtgatgtaaaggaagccatcttcgtctttcttatcctcgtaaacgcttgacattagctctcctgttggaggaagaacattgtctacgaaaatgaagatagctttctctgcacttagtttgattctcttccgaatcacatacacaaattgaccaactgttaggtctgatggcacaaggtacttcttcttgtctatatttgggacttcacttttctcagccttttccacaatcacaggaattcgatcagggtatttctccctgatccttccagcttcagcttttctcttttcgaaatcgttgtccatcttaaagatgcttcctttattcatctttgcttctgagaatatacacaatcaaagaaattgagacacaaaaccctaattttgttttcaacacccaaatcgaaattccgcgtcttttcggggaaaaaaatgaattctaaatctagagaaatcaaaacagagtatgtaacagcggacgcgtgg

SEQ ID NO: 168 - DNA, 718 bp, Arabidopsis thaliana
tcgagcggccgcccgggcaggtgaagtttcaaagaagaagtgaaaatggaaaccactgcttttaacacaacatcacgaattggaaactggtcatcggctatttctccacctctacaaacatgtggatctttcaagtgccaattaccaacacgaagaggtgttattgtagctgatcttcgaaactcaaacttccgatggaggaaagcaacgacaacaagcagaggaaatgttgcagcagaggcagttaaaattcctacgtcagtaccagtaagagtggcgcgtgagctagctcaagcaggataccgctatctcgacgtgaggacaccagacgaattcagcatcggacatccgactagagccatcaacgtaccttacatgtacagagtcggatcaggaatggttaagaacccgagttttctaagacaggtctcgtcccacttcaggaaacacgatgaaatcataatcggttgtgagagcggtcaaatgtcatttatggcctcaactgatcttctcactgctggcttcacggcgatcacagacattgctggaggatacgtcgcttggacagagaatgagctgccggtagaagagtgaaaacaatcatagccatatcacctcctgtaattatcaataaattctgtagatgttctcaacgcaagtatcaatcatcattattattctctaaaacatagtttaactgtcaaaaaaaaaaaaaaag

SEQ ID NO: 169 - DNA, 717 bp, Arabidopsis thaliana
  misc_feature (1)...(717): n = A,T,C or G
ttttaagttgaggaacacaaaattataataaaattgaagacttgttgttaatgtcacacacaaacacacacaattctattttatgaaaacagagtaaaagaaaacagaatagattagagatcttcttcatcgaagtctatacgaattttaagtctccataaatttccctatactcaacaaatgctcaatnnnnaagtcaggacttgggaagagtatatgctcataagactctaatcnnnctgaatctccacaactcctcctttcctccgttgtcaccgccacatcgtcagcctgaccattagctgtcgtcgtttgaggctgctttcgtttggaccgagctcgccggttttgaaaccaattgtagacatttgtctccgtgatctgtccatgttcagacagctccgtcgcgatctctctaatcctccgtcgattcggtgttccacttccttcgtcgtaaatgctctcaagtatctgaagctgtgttgaagtcggagtccaccgatgcctagtcgatatcctatgagaacttgacgatgcccccatcggatcaaagtatccgccaaccattggcctcactcctgatgagagtggatggtaagaagagagggagttgtggaggaggacgagttggtcacaaataacggcgtaaacggcgatctgcttacggagaatctccatctgctcctcagtcatcactctcccactgtacgcaccgtt

SEQ ID NO: 170 - DNA, 717 bp, Arabidopsis thaliana
  misc_feature (1)...(717): n = A,T,C or G
tttttacaaagcttcgtcagctggaacgaaaccaagcttcaaacttacaacattaaacattagagatttcagacaaatgaaagaaacaacagagacacaattccacataactcgacaagacaaatcctcctaactcaaatactacaagataacctaaaaagataacgnnntnnncaaagaccaaacacaaacagagtgggattcaaatctaaaagagatgtcacataatcctacctcatcataatactctcctactgcattgtgtttgttgtgtacagctcatcttacaaagtttatttggcccgtcctttgcctcgacctcctctgcctcttcctctacctcggcctcttcctcttctgctgtatgccaagaccttggtatttcccgggctgctacttgctgagtttgagttaggtagagactggtctcctgggagccactcttcttcatgggtgcttgaactgttagaggcacttgagtggctgtcattgctttcgttattaattgcaccatctgagccattccctactgtcatatcatcaccatgaatttcagctataggctgagaagccttggtttcttctggtggtgtgggttttggttgaccttccataaccgctggtgaactaggtgatgaagatgggaaaccgttagaagtatgacgtgatgcgcctatttcatcagcttcttttgatgtttcaaacacatctttaggg

SEQ ID NO: 171 - DNA, 717 bp, Arabidopsis thaliana
catctttcggcattccaagctcttcgccttcttctaccagactcaaagtctctctgctgccttcatcttctacccatggcggccttagttcctgcgtccttacgaaaccatccgtctcgcttacgaaggtcttcgctgttcccgataccctagatccaactccagaaattctcgatgaacccgcctctgaggttccgagctcttcatccatcagtgtagacgcggataagatggcgccaaagcaaaagattaggatcaagcttagatcatactgggtgcctcttattgaggactcatgcaagcagatacttgatgctgcgagaaacaccaatgcaaagacgatgggtcctgttccattgccaaccaagaagcgtatctactgtgttctcaagtctcctcacgttcacaaggatgctaggttccattttgaaatccggacacaccagcgcatgattgatattctctacccgactgctcaaactatcgattctttgatgcaacttgatcttcctgctggtgtcgatgtggaagtgaagctctgaagaagaagcgtaactacaatgatgtgatgggcacttttgcattgaatgaacagactgtttcagatcaactacattgcttagaactggtaagccttgtatcatcttttttgagaacctttgtaacgaaaatgtaagttgtattatctggtccttggaatctatctttagcgatgct

SEQ ID NO: 172 - DNA, 717 bp, Arabidopsis thaliana
tttttttttttttttttttgaggggagcagaaatattataatttaccttaaaagggtttcaatacatccatccaatgcataggtctattatatcaaaagtgcactgaagaagaaagaaatgagacgctaagatgcggaggtaactgcaacttgggtggtttccttatccttagcctccttaagtagcttccacttctcaatggtgtcgatgagttcccctgttttgatcagatatcttaccttctgtccatcttcaagtaccttgtgacccacccggcttactacgtctttttcttttgaatacaacatcacatttgagctgtggataggtgcttctatcttgacaatttgaccaggctctccctcttctcggctcttcatgtgttttgttttgaggttcacatctttgatcacaatggtactgttgtgagtgaaaatcttagtaacctctccgattttacccttgtcgcgtccagatattactttgactgtatctccaaacttgacatgcattttgtggagaatcggaagactgtttggtttgcattcttttcgttcccaacgcttgagctttgcaagaacaagacatgggttctcagcgggcttgaccggagaagtgacggagagggaaatcggggaaattaaacgctggccgaggaaggaagagctgggagatagagaaagagaagtaaaagagctctgaagagcagacatggt

SEQ ID NO: 173 - DNA, 717 bp, Arabidopsis thaliana
aatctgggtttttagttcaggtgttaatataagattttgatcaaaagaagacgagattcgatccgatccgatctgattgaagaagaaatggcgaatctgtatgtgaaagcggttccaccaccggatatgaataggaatacggaatggttcatgtatccaggagtttggacgacttacatgcttattctcttcttcggttggctcgttgttctctctgtctctggttgttcccctggaatggcttggactgttgttaatctcgctcacttcgttgtaacgtatcacagcttccactggatgaaaggaactccttttgcagatgaccaaggaatctacaatggtttaacttggtgggaacaaatggacaatggtcaacagcttacccgcaaccgcaaatttcttaccctagttcctgttgttctgtacttgattgcatcgcatacaacagattacagacatccatggctgttcctcaacacactcgctgtgatggttctcgttgttgccaagttccccaacatgcacaaggtacgcatctttggtatcaatggtgataaataagtttcctttacggcaagagaacacctgaaagaaggaaaaggggatataagcgaacatatatatgtgtaaatgttcatatgagttggtttaattctcgagtcatgttttttgttggatatttgtaagtaaactctctaattttgaagctttcatctt

SEQ ID NO: 174 - DNA, 717 bp, Arabidopsis thaliana
  misc_feature (1)...(717): n = A,T,C or G
ccacgcgtccgctggtttcttctcccagcatctttaattataatcaacgacatcttcgcctacattttcggtttcttctttggaagaacgcctttaataaagctgtctccaaagaaaacatgggagggattcatcggagcctctgtgacaactatcatctctgcatttgttctggcaaatattttgggtcgtttcccttggttgacatgcccacgacaggatttgtccactggctggctacagtgtgacgctgatccattgttcaaacctgaaccttttgctttacctgcatggattccagaatggtttccttggaaggaaatgacgatcctccctgttcagtggcatgctttatgcctcggtttgttcgcttcaatcatagcaccttttggaggatttttcgctagcggtttcaaaagagcattcaaaattaaggactttggtgatagtattccaggacatggtggaatcacagatagaatggactgccagatggttatggcagtatttgcctacatatatcttcaatcatttattgtctcccaaagcgtttcggttgacaaaatcctagaccagatattgacgaaccttacctncgaggaacaacaagcgctcttcgtgaaattnnnnnaaatgctgaangacaagctctcataggttctactgccaaaagtttcttttactcagatttgattctccaagaacaggttcctctgg

SEQ ID NO: 175 - DNA, 717 bp, Arabidopsis thaliana
gcggccgcgtttgtgtaagagatgggaaattgtcaagcggttgatgcggctgcgttggttctacaacatcctgatggcaagatcgatagatattacggtcctgtatccgttagtgagatcatgcgtatgtatcctggtcactacgtttctcttattattcctttgccggagaagaatattccggcgacaacaacaacaacagatgataagagtgagagaaaggttgtgaggttcacgcgcgtgaaacttctccgaccaacggagaatcttgtacttggtcatgcttatcgtctcatcacttcacaagaggttatgaaggttttaagagccaagaagtacgcgaaaacaaagaaacaccaaagtgaaacgagtaaggagaagaagaagccatcatcggagaagaagattgatgaagaatccgacaagaatcagaatctggaaacgaaagatgagaagcaacgttcagtgttaacgaattcagcttcatcgagatcaaaaacatggaggccatcattgcagagcatctctgaagctacgagttgatgtttgggttttacgtgagggacaagaaacgtagtctctgtgtgtgaatcattcagaagatggaatctgaagaagaaagagatataaacattattgaataaactcttctcttatgttcctttctggttataatttacataggagatgaaaattttatagattaagatgtaaaaa

SEQ ID NO: 176 - DNA, 717 bp, Arabidopsis thaliana
  misc_feature (1)...(717): n = A,T,C or G
ttttttttttttatctcaatatatagtttcttactttaaggaaaaataaagttccatatctcttaatgggtcttacaatggttcacaaccctagaaaataaacatacaagaaatttcttttaaaaaacacttaaagagttgtaattagcctcttatacgtctatttttgtttgcttcctcataatcttatttgaactaattaatggattatgtccaaaacaatacaagcttcttaaatcttttgctgttcttcctcggagaaccctcagtatcactctttagtctcatctcctccatctccagtctactctctttctgcttcatcatcaccggattcgattccttagattttagcctcattttctctaaaacattcaccaaaccctctagcgccacgtcagcatcctcactcttcatcagctcctctgctacttgtgccggcgtcattacttccccgtcaatcaaacgctcaatctccggaaatagacggtgtggcatcgcagcatcactcaaacccaagtagttagaagctaaagtcttgaatccttgaaannngcaatgtcccatgtaaatgtgcatatccatacgtcctggtctaagcaatgccgggtcaagcctatctttatggtttgttgtgaatattataatccgctcgtctccacagcttgaccatagtccgtctatgaaattcagcagccccgataacgtcaatggtcc

SEQ ID NO: 177 - DNA, 716 bp, Arabidopsis thaliana
  misc_feature (1)...(716): n = A,T,C or G
aacgaggcctaaccaaattccgaaccaaacaccgagccacactccaaacccagcgtcagctaatccaagcctcacgtctcctagctcgagcccgaaccacacccaagaaatctcaatctcaatctctcgccaaaacggcgctcaccgaagctgataatgtgatcgcgatttctccagatgatgccgccggtcacatcgtccgtgccctagctctagatctgctcggtcaccatacttctgctctcaaatcgttcgatatggcgctgacttatccgcgtttgaagtcgctttcggttggagaacgagccgatgcgcttgtgaagagagctgagatgaagctggctgtgaatcggcgacggaggattgattcggcggtcgaggatctggaagaggcggtgaggctcgccgccggtacagatacggcgagattgttccggctgttgggagagtgttatgagttcaagggcttgaaagagaaagcccagtgggcctttaatgaagctttaaaagctcnacctagttccgtaaacggcacgtgatgaatgagatggaccggactaggtcgtggctttgtttnnnnntagtataacttcttagaatttcactttgtatcctgctatttttcannntttacattatgacctcgaacgctttagttttactcagatttaaagtgtgttcaattatgcttttaaaaatgttatgacaatttgaga

SEQ ID NO: 178 - DNA, 716 bp, Arabidopsis thaliana
cttttttttttttttttttttttttttttattcaaaaggtttaacaaacaaatagcaacaacaccaaaaacacattcttatgggatgtccaatcatctaaaaacttcccctgatcaatttgtacaccaaagccccatcacttaaaaaacttcatgaaaaaaagaaacagagaacaccacaaggttacaattttgacacagatttcaccgattcagaacttagttccagtttatatcggtcgtacaaattcccgagctttcgtttcaaaagtgcaactgcctacaccttgagatgtctacatcggttgggcaataaggacacttgaacgacgacttagagccattctttgacattttgttgatcgtctgcttgcaaagcacatgtccacaagacatcatcatcggagggttatcatcacttgactgttctttagagactggacagacaaacaccgaatgaaactgaaactcctcggatagttgcgcatcaacaggaagttgttccatggtctgccaatcaagcttcttattcgccatcaccacgttcatgtatttcaatagtactggtaacgcttgtgtgcccgctgttactgttatactcaacgggctttcagatgattcaccgagtaggttgcagtactgtcgggttagctctttgactgcattgttccacagagcgggggagagaaactcggagtatggtgatttatcgagttt

SEQ ID NO: 179 - DNA, 716 bp, Arabidopsis thaliana
  misc_feature (1)...(716): n = A,T,C or G
aggttgtagctcttcctctcgtaatttcctcttcttcttctttcagacagaagcttgcctttgtccgaatttagggtttccatttttctttccgttcttccttcaatcaaatactcgaaaccctaatctcttcttgatcaggccttgtcgatttactgtcccttgtatcaacttaaggttcatgtctgatcttgaagttcaagtccccactnnctttgatccgttcgctgatgcaaatgctgaggactctggggcgggaacaaaggaatacgtgcacattcgtgttcagcagcgtaatggtagaaaaagcttgacaactgtccaggggcttaagaaagagtatagctatagcaagatacttaaagaccttaagaaagaattctgctgcaatggcaccgtcgtccaggactctgaattaggacaggttattcagcttcaaggtgatcagaggaagaacgtatctacgttccttgttcaggctgggcttgtgaagaaggataacataaaaatccatggtttttgagcaattctagagatactccttgttcagcttgtatttacgggatcagccagtcccaaaaggaatttataaaccattacttaaatgtattaatgcttttattatgtattgtgtcaaaaaaataatctaatagtttgcttatgagcgtatatataaatgtatcaacttttggtatgcatttgtacttgtagtgtga

SEQ ID NO: 180 - DNA, 716 bp, Arabidopsis thaliana
ctttttttttttttttttttttgtgtattgtactattcatattcatttatcacattacaatcatcaaccaaaccaaaaacacaaacataacaacaagggacaagaagaacaaacattgatccatacctaaagtttcataattcgaacatcaaaaacatattttttaattatcataagtacgacactcatcagtctcaggattatcattgcaatactcttccaaaggatcggagccaccagctttcttcttgtccctagcatgactcgccgccgcactcagctcctccacctcgtcccaagccgctacacactccccgctcaccggatcatcagcgcatgtctccttagcttcttgtatactcttctccaccttctccgatatctctccttccgatgtagccttaaccacaaccatccgcttcatcgaaccgaatttccacgggtaattcaaccggaccggacctaatacacgagccacaggtcgaacgaccactcgtggagtcgcgacgttgaggccagctgcagcacctgcccgggcggccgctcgatctggcggccggtcgcggccgaggtacaacaagcgttggaagagaatagattgtatatgttggattaccatgacatattcttaccgttcctagaccggattaatgcgctagacggacgcaaagcctatgctactcgaactatcttcttcttgactcgtctaggcacac

SEQ ID NO: 181 - DNA, 716 bp, Arabidopsis thaliana
ttatacaaaatgggtagctcaaatggcattaggactctcaactggtgttccatggattatgtgcaagcaagaagatgctcctggtcctatcatagacacatgcaatggttattactgtgaagatttcaaaccgaactcaatcaacaagccaaagatgtggacagagaattggactggttggtacacagattttggaggtgcggtaccatacagaccagtcgaagatattgcatactccgttgcacgatttatccaaaaaggaggttccctcgtcaattactatatgtatcatggaggaacaaatttcgacagaacagccggtgagttcatggcttcaagctatgactatgacgctcctctcgatgaatacggcttaccaagagaaccaaagtatagtcacttgaaagcattgcataaagccatcaaacttagtgagccagctttgctttctgctgatgctaccgttacatcgcttggagctaagcaagaagcttatgtgttctggtctaaatcatcttgtgctgcgtttttatcgaacaaagatgagaactctgcagcgagagttctgttccgtggattcccatatgatttgcctccttggtcagtcagtattttacctgattgcaaaacagaggtttacaacactgcaaaggtcaatgcaccaagcgtacacaggaatatggttcctactggtacctgcccgggcggccgctcga

SEQ ID NO: 182 - DNA, 716 bp, Arabidopsis thaliana
tcgagcggccgcccgggcaggtctcctcgaacaaaaacaacaaacgcagagaaactcaaaactcgaaaacgacaacgtttcatatagcaacgatgctttcttcatctccaacttccttttctcatccatttctctcttcttctccgcctctatctccgatatctccgccgtctcgcacggctcggatctctccacctctcgtctccgcctcttgctcatacacctacacggaagattcgccgagactgcatcagatcccgcggcgattgacgacggtgccagcttcgctttacgatgttcttgaggttccgttaggcgcgacgagtcaggatatcaaatcggcttaccggagattagccaggatctgccatccagacgtggcgggaactgatcggacttcttcttcatcggcggatgaattcatgaagatccatgccgcttactgtacgctttctgatcctgagaaacgctccgtttatgatcggaggatgttgcgacggagccgtcctttgaccgtcggaacctccgggttgggaagctacgtcggacggaactgggaaaccgatcagtgttggtagtgagttaactcggtgaccgagttagtagaacgagttaattagtgtaaatacgaagccataaaatccttgtaatttaatcatagtaagctaacatggacgggaactagtgtgctaacatacgccatgtgcttaccgtac

SEQ ID NO: 183 - DNA, 715 bp, Arabidopsis thaliana
  misc_feature (1)...(715): n = A,T,C or G
atcttcttagatcattaatctttttatacatacagtgtgagcaaagagctctacaacaatggttgttttcaagcaggtcagtctcataagagatttcactcctgcaaattgtctggtttcaccatcttcttcctcctccattgattcctcagcttttggttgatcaaatccaaatctcatcttcaagtacataacctcacagtacatgccnnngcttgtgcccaaaatttcaaccttgctttaacatcatcaggattatcaccaggactagagatcttccagctagcaataggactaacaggagaatcaagaaccgatgatttcttctctggcgaagaagaagaatggtgatgatgatcttgatcaataaacttctgactcatcgagtaacagagctcaagagctggtaaagtattacaaagttcaggaatctcctcgtaattaaacccaaaccctagatctacacatcccttaagctcctcgagatcatcgtccgttaaactcttggttctcttcaaatcatcattcacagctgaatctacaacgtaaccttctaacaacacattactcttcttcttctccagtttcttcgtttgcttcttcgactgaacaacaccaaaaccattgttgatctcttcttcctcagattcactgtacgaacaagaactgaaactggaggtcgagatctcgctgtcggaatcaacgtctgcttcgt

SEQ ID NO: 184 - DNA, 715 bp, Arabidopsis thaliana
  misc_feature (1)...(715): n = A,T,C or G
tttttttttttttttttttttgactaaacaacggacatttgtttatttcttaaagaattttgctaagttgctaatacaaaaattacaaacttggatactttcacagaggcactcgcagtaatatctaactccaaatgtatatcaaactttaatttagacacaatcaaagaaaaatgaaaaacaagtttcaagtttcagcctaagagacactcgatcaacgatgcttaagtcaggacaacgtaatatctttcacctctctttttttgttgatattaaacacttccaaagaactgttctattgactgcgaggtgaacacatttggagctgttcgctcgggtttcaccgtagcgacatgaagctgatatttgatgaacctagctagttgtgtgctgatttccgggtttgtatcaatatgccagtcaggttctagctgtctgacaaaggaagttcttcctatctctgtactacaaaagagcaccttatctttgactnnnnnnnnagatgtaaaaacgnctgcattctctaaagcctgtaaaactttggcctcgctttcatcgtcaagaactctttccataagatacaaatcactatactttgtaatctctagtagaacttccaaaacagatgacctcactgtggcttgtttttggagttcttctggacttgtttcctcaagaattactccaagaagacggcatgttacctacctgcccg

SEQ ID NO: 185 - DNA, 715 bp, Arabidopsis thaliana
tcgagcggccgcccgggcaggtacttgcattctacgcgaacctccaatagctgagtgtggaatatcaccatctcctcctatttcgttgcttgtatcaattatcaccactcttttctggaattcatcagacaagacacgagcaatctctcgcaaaacagtggtcttaccaacaccaggccgtccaacgaacaagatgcttttgccatagtgaagaagatcataaagcatgtcaatgtgaccactcacagctctcccaacacgacaagttaaaccgacaatgaatcccttccgattacgaatagctgatatcctgtgcaatgtaccttctattccagctctattatcagctccaaactcacctacaagctcttgagcatcctctaactcttccatagatacctaagctcgttgttcctaagatattgacctccaggttctccgagataacgtgcttcaggtggtcttcctaaatccattatgacctctacgagctggtttcttcttgaatcgttcaagagacggtgacgaagatcttttggaagaatctcgagaaatgcgccgagattgtcgtcgacgatcatagaggaggagtctggaagagcaagagaagcgacggaggaggaaaccggaaaacgccggcgaattggggaaataagacgacaagctccgccgccccatgggacgcaaactccggccatagtttccggacgcgtgg

SEQ ID NO: 186 - DNA, 715 bp, Arabidopsis thaliana
ctttttttttttttttaggaaagatatagacttggataatgagctcagtagtacaaaactttgaagcactaagacaaagctgagattggagaatgcaaaaacaagacaaaaagcaaagttctatactgcagattcttgggttactttaggcaagaaggtatcccaccatccaggttcatacttggggtatggcgccacccaatttttaggcttatcgaactcaagagtggtaggattggaggccaaagcttcatcaagagaggtagcttcaaaggaatcatacagaacacgatccaatcttaacttcataaacgtgatccaggtgccattggtggaaacaagagcaacagcaggacgacgaagtctttgagtaattttggggaaattgtcaaggaatttaggctcaatgacaagccagaagtcttgcactaattcacgctcaccgaagtaacggagacgttcaaacaattgctcctggaagtgctcctcttcgtcaagcatgaatttagcgtttgctaccaggaaatggtacttggtgctctctcccttgttaacagaagactgttgctcgatggaggtagctgcggttttgaaagaggaggagaaatgtgatgatggtagagacagagaaggcgaagagagatggagtttctttgtctgcttgggaaaggaagaggagatgagaaagggtttcgtacggcaagcggcggcggta

SEQ ID NO: 187 - DNA, 714 bp, Arabidopsis thaliana
ttctctttaatgccttacgaattcatacaaatcaccataataacaacataataagaaacaaagacagggaggtagtttagataaacaccataaaagggactcaaaacatgaagaaacaaaagagaagaaacatcaaacttgaagaaacaaggccattaactccgaacgcgaaagctcctgagttagaggccggagaatagctaccctccggtgtgctagtagtgaggacaacaacaatccaattatcatcagaaccaataccaattccagtgaacttagaatcattcaagtccttggagtactgtgacattgtgaaattggtcaagacaaggctaggatcaaggttaggaacacaagctggcaaaatcgcaccgtctctagttacggtagggttgaggcggcattttgagaggaggttaggcaagtttgggaatccaggtgtggttccagggacagaggctgagccagtggtgtttgtgcaaggttggttcttgaattggtctgcgatttcgtctgctagacattctgcgttgtggttgtgtattaaggttgttaggtttagtgatgctctgtaactgttgatgcctgtacgaagaacatcttcttcatcggcggtgtcggaaagaacaagaggatgaagagagagaaagactgaaagaaggaagagtagatggagcttggagatcgccattgatgcagagaggttcttcttct

SEQ ID NO: 188 - DNA, 714 bp, Arabidopsis thaliana
cttcctattctcgtctcctcggtcttgttccttgtctttatttcatcgtccctcttgttccctacacctagttttgctgctagagtaagtcattctctggtgcaagaagaggtcaaaaaggttccagaatacacagaacctgaggagccggaagttccagaagagccggagctgccctcaccggaggagcctgagattccagaagagcctgagattccagaagagcctgaggttcctggagaacccgaagttcctgaagagcccgaagaaccagaagagccagaagggtcaacatttgaatttccatcatggtttccgagctttcctattcccggtgttaatggcggtttgccaaagactgaaaagacaaaacctacatcaacagttgaagaggttaacgtttctaacaagaagccatagatcaatgggtaaagaacgtcaaatgattatataaactatatatgcaattatagttttggtttgtgtttggttaaagatgagagattacatatgtattacagtattagagtcctcaccatgtcatgattgagtctctaaacgctcctgatataatctcgtactaattctctcttgtaatatgtatatctcttgtggtacaaaaaatatatatataactcttaagtaaatcatgtaatgtaagatatttaattaaagatataatgtgtcaattgtcggtgtatatgacgttcgtct

SEQ ID NO: 189 - DNA, 714 bp, Arabidopsis thaliana
agcgtgacgctcactatctacgcggcctcctcccccccactgttatctcacaagatcttcaggttaaaaaaattatgcacactcttcgtcagtatcaagttcccttgcagaagtatatggctatgatggatctccaggagaccaacgagaggctgttttacaaacttctcattgatcacgtcgaggagttgctacccgttatctacactccaacggttggggaagcctgccagaagtatggtagcattttcctgcgtccacaggggctttttatcagcttgaaagaaaaaggtaagattcatgaagtgctgaggaactggcctgagaagaacatccaggtcattgttgtcactgatggggagcgcattttagggttaggagatcttggatgtcagggaatgggaatacctgttgggaaactttctctctacacagcccttggaggtgtccggccatctgcctgtctgcccgtaacaatcgatgttgggacaaacaacgaaaagctattgaacgatgagttctacatagggctccgccaaaggagagctacaggagaggaatactccgaacttatgcatgaattcatgacagcagtcaagcagaactatggggagaaagtcgttattcagtttgaagactttgccaaccataatgcttttgatctgttagctaagtatggtacaacacatcttgttttcaatgacgatattcagg

SEQ ID NO: 190 - DNA, 714 bp, Arabidopsis thaliana
ccacgcgtccgcgacctggagatatcgtccggatgagcaagatggggcagtatcactcttcgagaacgacttggcatgatgtgatcggaaagcattgcccgatcttcgccgtcaatcgcgaggtgttgatcccaatagcgaaaccaattggctacacaggaactgatccttataagataaaattccaagttggaagtgagaaatttctgattcactggcttttggtaattaaccgtaagagctcagaagttccgatgatcgatgtaaatttgagatattctggaggagatctgcttggagtcacagctcaagttatcgacatgcctcatagctatctgaatacacacccggagatccgcaaacagttttgggatcctcaacactggccaaaacatgttcttgttagatacacatggaaggagcagtcagagattgatgtatcctcaggattctatgtcctgtttggctcagctctcacattttcttttgtactctccatttacgtcttacaatcgtcacgagagaagctggcaaggtttgtaagagagacggtggtggagagcagcagcatgaatgttggagaatttggcaagggggattgagtcacatagtcaagtatatgtatgtttctacaattttagatacttggaatatggaattggccgttcaactctcagaaaagatttttcatcaaacatgaatagtcgaaagcaa

SEQ ID NO: 191 - DNA, 714 bp, Arabidopsis thaliana
agaatggcgttccctaaggtatacttcgacatgaccatcgacggccagcccgcgggaaggatcgtgatggagctgtacaccgataagactcccaggactgccgagaatttcagagctctctgcaccggagagaaaggtgttggcggtaccggaaaaccccttcacttcaagggatctaagtttcaccgtgtgatccctaacttcatgtgccagggaggagatttcaccgccgggaacggaacaggcggtgagtcgatctacgggagcaagttcgaggacgagaatttcgagaggaagcacaccggaccggggatcctgtcgatggcgaacgccggtgcaaacacgaacggatctcagttcttcatctgcaccgtgaagaccgattggcttgatgggaagcacgtggtgtttgggcaggtcgtggaaggcttagacgtggtaaaggccatcgagaaggttggatcatcatctggaaagccgacgaagcctgtggttgttgccgattgtggtcagctctcttaggatcttcctatcatcatccttaatttagcatcatcgtcgtcattgtggtgtctctttatgcttttgcttttgttatggagtctttttaaaatttgtagtcataagtttggtgtgtgttctcatgggaacatatataaacttgcccctttaatattaactaccagaaataaggaatgagcactcttttatcat

SEQ ID NO: 192 - DNA, 713 bp, Arabidopsis thaliana
ttttttttttttttttgagaatatttttctataattttagagaggaaaaaattacaaagcactttgagaaaagggcatatatctcacacaccgcaaatcgacaacaacacccgaatctaatactcacatgatttatcttaaacccaactttctttttcctaactcaacgtgaaaccgtacgtatgtctttaagaagacccaagacctgttgcattgttggtcgcttcactggcgtctccgccgtgcaaaagtaaccaattcgaagactctctaccatctcattaaccgattctccagcagctaaccgcaatctcgagtcaagagcttcctctcctcttctctccttaaccaaccggcgaacggatttaacattctcatcactcccttgcttcccggttaataactcaaacaaaatcaccccgaaactatacacatcgaattctacattgtttttattagtatcatctccggttctcgcaatgttgttgataccgaaatcagagatacgcggctctagggtttcggttaggaggatgttggtagcgactaagtgtccatgagtagtaccaacgtggtgtagataggctaaaccacgtgcaactcctatggcgatacggtgacgtattagccaatttgttttctccggtgatgagtctccgacgtgactctcccatgtatcggcactccaatcttccacgttggtttctcccgcc

SEQ ID NO: 193 - DNA, 713 bp, Arabidopsis thaliana
tacttgttcatagaagcaaaaacacaaagaagcaattgggtaagctcataattatttcaaaccccagaaaacacaaaagggttttgttacaaactctgaaacgaaaactcaaaccctaaacagaataatccattaaggtaagaggaagaacaaccgaaagcaaaagacaccattattactcataaagatcaaagtctctcactttctcactcagatctaagaaagctgaccacaatcagtgatggtaacgactttggaagtctttccagaatcagatccaactttctcaatcgccttcacgacgtccaagcctttaacaacttgtccaaacacaacgtgcttaccatctaaccacgacgtcttatcggtacagatgaagaactgagatccgttagtgttaggaccagagttagccattgagagaatcccagctcctgtatgcttcttgataaagttctcgtccttgaacttagcaccgtagatcgattcaccaccggttccgttcttggcggtgaaatcacctccttgacacatgaatccgggaatcacacggtggaagatcgatcctttgaagtgaagtggcttacctagctttcccattcctttctcgccggtacagagagcacggaaattctccgccgtgtttggggttgtatcagcgaaaagctccatctcgatccgtccgatgggagtaccgctgagactcatgtcga

SEQ ID NO: 194 - DNA, 713 bp, Arabidopsis thaliana
ccacgcgtccggtctgatcgtagcgtcttgaaagtctccggcaagcgtaaaaagaatgcgttgcgctctgaatcgaatacagcattgtgcaaagtttccactgcaaaagatacttacattgttaggtgctgcgttaaaggctctctcttggaggtcaacgagagattgattaagcaaccagagcttcttaattcaacggctgaccgcgaagggtatattgcgataattatgccaagacctgcagattggaccaaaaacaaggagtcactgataactctggaggaatataaagaaaagaaagaaatgtctttatgatctgaagctgatgatgattagggccgttaggcataagtcaaatttggtgaagaactttgaaggtcttttgcagtctaatcgtttgaagctctacaatatttatcaactgttgtgttgtgttttggctgacaaaactattttgcaagcaatacaattttgcaatgttcttcatgaaacctttttacattgctgtattagaaaacacgagactacactatataactttgaataggcatgggcgttcgggtattcgggttcgggtttttcgggtttagaaatttaaaacccattcgggtaatttaagatttcgggtcgggatcggttcgggttcgggtttgggttcgaatttatttatatattgaaatatcaaaattttgtatgtaaaaaaaaaaaaaaag

SEQ ID NO: 195 - DNA, 713 bp, Arabidopsis thaliana
  misc_feature (1)...(713): n = A,T,C or G
ttttttttttttttttttttttagtggaacaggatgatattgatatcttattacaggtaaaacaagcagcaacaagtggtaggtagataatacatgatagttagagcagtgagaaacactaactctccatgatttgttcaaattcttgaagtacacttaaaaattcgggtctcttttatctgctgaagctgagctgattaggccgcctctttgactgcgacagcctccttgattgcaacagcctccttggcctcggtggcttcgctgctcttctccttggcaggttcctctttggcaggttcctccttggcaggttcttctgggactataaaagctgtgaccgggaaagtcctggacagtgtggtcggtgtcttgaacgtgatcttggtagggggttcctcggtatagatctcattgatagtgacccaaataagaagttccttggctttgactccagtgagcttcttgattttcccggtctcaacaatggctgtgacttcggttccataggagacaagcttatctatctctgtgaacttgtgagtgatgctcttcttctgcttcagccatacaacacctgactctctgtcatacccaacctcttctatatccttcaatggtaataaaccattgggcatagatatttccttgaggnnncactttgtcttctctctacatatctcatctccggtgtacatctctgccttagctct

SEQ ID NO: 196 - DNA, 712 bp, Arabidopsis thaliana
ctttttttttttttttttttatcaaaaggtaaaacctttattattgttattattatatctataaagaaaggttcgcaggttaacatacgctaaaatgtaaaccagaattctaccctagaaacccgaaaaagctttgatttttatgattttcccatataggtgggctctaaagatcactccggttcttcatatgtgagcataccgcttgaaaacctgcttccccgccacaactgcaccagccgcaattccgccaaaagcaccagccacagccgcagatctcactcctcgtgctgccctaaagaccgctccagttcccagaccagcgacaacactggtccaaacatcgtccttatcagttaccgccaccacaccactctcaatccctgcgtagatcaacccaacaatcccaaccctattaccccaagtacgacctgcctgaccagacgaattcaaaatcctgttgattttcagcttcgtcgtgtctccattttcgaaactcttgataccagagaagatcccagctgaagcaccggctacagagccggctagataacccgtccctgtgtagaaagtgagattttctccccatgatcgacgctgcttgagagactcttccgtgaatagaaattccggagaagtcggaagcttgtatagatactgagatttgatcgggacctggtagttctggtaaggatggtaaaggcggccgcga

SEQ ID NO: 197 - DNA, 712 bp, Arabidopsis thaliana
  misc_feature (1)...(712): n = A,T,C or G
aactcatatatatatctaagaaaatcaactacataattaccttctccgttgctttttgagtagatttctcttgatccgtattaacgttcttatatccagcttcggctacagcatttgccggttgagcctccttacctccaaccttccatggctcagccggcacatcaatggccatcggtcgaacgtccttacctccatattcaagagccttccatggctcagccggctcatcaatggccatcggccgaacctccttacctccatattcaagaactttccatggctcaaccggctcatcaatggccatcggtgtagacatggtcattatcgggcttctaaccacaggatatggattatctttaggttctgagtcagcaaaggattgnnnnagtgaggaccagaactctacggtatctcgatccttgtccatattcatgaaaggtaactagctgaaaagtgatatggagagtttgtgccaattgcaagaggtatttataggagaggaaacaagagcgggaaagagggttatcgactcaaacttctgtcggaacttgatcatattactataggatttctattttgtcgcttgaggatatatattatatatccatcttcttgttttatgttaatttctttatccatcagtttctgttttcgttatttatccacttttcactgttgttaactataataaatcggaaagttgatcaaa

SEQ ID NO: 198 - DNA, 712 bp, Arabidopsis thaliana
tttttttttttttttttttttttttttttttaagtatctacaagtttttattttcattgcagcaaaaatttacaaaacgcataaaagcattaccgaaaaaaacgagattacatataaaaaacaaacacacaaacaaactcatacacgcatacataagagaacactgaacacctctttggcctacaaaagcaaaaaaaccaccacttcatgcagtctaaacgacatcgtttaagggtgggtactctgttttcttcttctcttctctttttcaagacttgtgttgtgtgttagagatcacatgccgtaagtaggaggagagctccttggtccagtctctgatcctcctgctgccttctcgaacgcatccgacgtcgaccgtctcctaaaccgaaagggttcctttccccctgcgtttgctcagagaacggagacagcggcggagagaaaggtgatagcggcggagttgaaccggcaggcgaagctggagctgaactgccttggtaacccggtggtttaattatcatgatactacgtgtaactttcactgcttcttccggtagcgaatcctcaccgtacgatctcgcacttccagcttccgattgatcattgccggagctaggtcggaaactgaaggtatggtgtttacgaagcttgccaaggccgttctctggccgtggaccagcgacagtatcatcccagagatgatcaagta

SEQ ID NO: 199 - DNA, 711 bp, Arabidopsis thaliana
  misc_feature (1)...(711): n = A,T,C or G
tttttttttgcccgcttaatagtttcaatataagagtttatatacacacatcttcatacaaaaacaaaatataccatgaaaaattctatatattacaagtataaatacaaaacaaaacaaacaaaaaagtaaatataattaanagaccatgcatttaaggatcactattaaaacaaagaaacaaaaattccaaatactaattataattttaagaaaaagtaagtcatttagtttggatcaacaacatcaacggtagcagcacaagataataaccttcgaaaaatccttaaaataacagaacaagcttgttcttgtttgttcttcctactaactctcctcttctcaccacgacgacgcggctttgtactctcaacgatgatgatgccattttcctccttactcttacgtcgagacgacgctgttcccttaactctccctagacacgacgtctgcgtcccagacgacaccttctccgatttgctctcgtcgtcttcccgagagaaagtgtagctacggagatacatctgtcgacaagatatgctatcaactacacgggccgccggtaggccgcctccacgacgtacggacctgacgaactcggcgtcggactccggccacttatagagattcacgtaggaggcacgtacaggacgaaccggcacgcgagggtcgtgtgcatcgttgatgcagctggagatacacactgagttc

SEQ ID NO: 200 - DNA, 711 bp, Arabidopsis thaliana
atttctgatcatgctaatgataatcgcatctacgatgaatttgagccactctcaaattggaaaactgaacaaggattcgaagctctcactatttaccttccagggtttaagaaagagcagcttaaggtgcaagtaaccaccacgaggaagctgagagtgatgggagatcgtccagcaggagccaacaaatggatccgtttccgcaaagagtttcctattccgccaaacatcgacgtcgactccgtctctgccaaattcgaaggcgcaaatctcgttgtgaggcttcctagaaccgagccaatgggcaaacaaccttcacctattggtacagccacaaaacctcctccagttcctaaagaaaaccccaaccttcctagcccggcagcgaaagaaaaggtccaaccaccaaaggaaacaagagagaatgaaacggaactagaaaaacaggccgagaagattcaatcaccaaagccagcaagagagaacgaagaagctcttaaccaagattacagaagtaaagtgaatgaatacaaggagaatcttggaggatatgtggcactgatgaagaataacagaacagcacttacggctggtgtggttgttcccgcagctgcggttctgttgctgtctcttggattctatgctggccaaatgtttacttcttaattcttatttacctatttgcatgattctcaaaggaaaataaaatgt

SEQ ID NO: 201 - DNA, 711 bp, Arabidopsis thaliana
aaaaacataaacaaggtttcaaaaacaaatatcgaaacgacaatgagatcaactaaacaaaagacagaaatacaaatgcctgaaacctcttcataagttctgcaaaacctaaagacttttttctctgtacagagaccaaacttcttctccactgcttttacctataagacacaaaaccagtattgtccatttgaaggaagaatcctaactctctgatgcaaatagaaatagtttgaatcgattctctctacctttcttcccgcggtatctgcgtgatctttatgccttcatatacagacttcaccatacagtttctttgattttactgtttcaatcttcatcctatcaacttaatactggctcggttttctggcttccgagcatagatcgtttcaaaaactccatcagtatcctcttttgctgctcatcaatgtgtgggaaacttgaacgtagaagctctattggcatttcgcggacaatggcttttgcagcttcttcagatatctcagtggcaaaatgcggtggcaattgcaaactctgcatgatgctatcgtatttgctgatgcagtacctcatcaacatattaaagaactcattaaaggaagcgcgccatagagctatccctgcgttgttgaaattattagcccggataagctcggaagctctgtcgagtattgatttcaatactgtggaagctccgcggacgcgtgg

SEQ ID NO: 202 - DNA, 711 bp, Arabidopsis thaliana
ttgcaaaagtcttgcagaaacctttttcattggatcaaaaagttacattgtatgttttgattatcagaaagcgatccaatacagaaggtttaatcacagcaaatgtgttacatacaaagatattattgaatcaaaggacttgcctatcagcagcctcggcaacaagaggcaacctcggggtcagaccaaacaagcaagccgagaatccatagatcaaagagacaagcaagaagaggaacactgtgctgtccaaactcatcaccacatctaaaccaaacccatctctaggattaaagctcctctcaagcaaatccgggaaaatcaacaacacatcaagcacaatcgcctgcatcgtgttgaacctgacgtacctgctgaaattagggttcctcacaacgacgaagtagagagtgatgaagataagaaacccattgaaagggaagctcttgaaagctctgatggcgggaaacaaaggttggatgagaatctgaaaaggttggtactgtgtgatgatgaatttgccgtattgaatcccatcgaagaatgggtagaagtaacagacggctgagattatccgatccgatgcatcgacggaatcatcacccttggattggagtacgagtgtggcggctctgtccctggaaagtctaggttttgggaattgggtatcaaggtttagagggagaaaagaacgaccggttagggttaggg

SEQ ID NO: 203 - DNA, 711 bp, Arabidopsis thaliana
  misc_feature (1)...(711): n = A,T,C or G
tttttttttttttttttttgaataaactttgtcccaagagggtttttatctgaaactataaagcaacgttacagaagaaaggaattaagagagaaacaagtgtaagaagttttgtaatagctaaagaagacgaccatgagaggttgtgagcaccaacagtatagattgctccactttcttcatccttgacttgtattcctcctgagcagttgtgattggtccatccaatgacttggttttcgatatcgtagacaactaacttgttagagagggccatgtctccaagaattgttaatgnnnnnccnnnnntagtctgcaatccaccattttgccagccaaaacaccatgtgtcttctcgaacttggaatagatattcccgaggataaaccgccaatgaaacagacttgtcaaactgaaaagtgacagttgggaaccgatctaatttgtctgtataatggaaacaagtaaacgactcttgaactgtatgcaaagtaagctctggatgtgaagccaatatctcattcagtaacgggttataaacagcatcaggaagatacaccagagttgtaccactatcaataataactcctttgtcatctcccgaatcaaaagcattcgaagaaagttctaaaactgaattaccaacttcaattgcattgaggttgacactatagtgagctgatttagagagcataggtgtagtctttactt

SEQ ID NO: 204 - DNA, 711 bp, Arabidopsis thaliana
tttttttttttttttaaccaaatcaataaaaatcttatacaatacttatattaacattgcaaagagtttcaaggtttttcttctgagttttgaaagaaattatagggaacaaaaggaataaagaggcatcaattcgatcactcagagctacaaaacaatgggactaaaacgcaaaacgaaagcggtttttttttttgaaacgcagacgtaagtaaaaacccagagagtttgtcacacacaagtgcatcatagaaacgaaaacaaaaagggaaatgaaacaaacaaatggagaagcaaatataaaagaaaaaaagaaactttgatcccattcataaaaccccagctttttaagcctttgatcttgagagcttagaaacattttctgtgaacgattcctggacctgcctcatcatactcggccttggagatccacatctgctggaatgtgctgagggaagcaagaatggaaccaccgatccagacactgtacttcctttcaggtggtgcaacgaccttaatcttcatgctgcttggtgcaagtgctgtgatttctttgctcatacggtcagcgatacctgagaacatagtggttccaccactgagcacaatgttaccgtacagatccttcctgatatccacatcacacttcatgattgagttataggttgtctcgtggattccagcagcttccattcccacaaacgagggctg

SEQ ID NO: 205 - DNA, 710 bp, Arabidopsis thaliana
  misc_feature (1)...(710): n = A,T,C or G
tttttttttttttttttgatgagaatcccctaattggattattctgacaataacaccgttactacaagattctctcagtttctgtttttataaattacgcaaatatggaacgaactaagatacacaacattccgcagacaagagagagaacaaacaaaatctgaaatctcagcaaccgtaagaaacggggaatgaaagaaccgcaaaaggccagaggaagagctccaacttgtgaaccaagaagctgcaagtggtggtgatggatgatgatagtaaccgatagggcagagaatctaaaaggtatgaagaaatcagggtttgaaggcagagaaggcgactaccgagttgtgtccaccgaacccgaacgagtttgatatggcaacatcaacctcgtgttgcttcttctcgtttgggaccgtgtcaaagtccacagcttgtncngggttaaattggttgatggaaggatgcagccatccagtgttgatagccttcacggtggcgatggcttctagacctccagctgcaccgaggcagtgacctatcatagacttggtggcgttgattttgatccctgaagtgctcttgaatacctttttaatggcattaatctcagcaagatcaccagcaagagtggaagttgcatgtgcattgatgtaatttacctcctcaggtgatacaccagcatcttccaggcatcttcggacgcgtgg

SEQ ID NO: 206 - DNA, 710 bp, Arabidopsis thaliana
ctttttttttttttttgtgcttaagaaagtttgtctattgaaagtaaaaagcgaaacagtgttactgctacaagtgatcaagaagaagatttgttatctcctgtaatatctttatgctcttcatcttcttctactctaactttgcttccacagcaacctcttcttctatgttcttcaaccacagttttttttacaatgctgtctcttttctctgcaagctccaatcttttctccataaactcagaattctccttccaaatctctccattagtgtaaacctctttcttccatatcggaaccgatgccttcaactcgtcgatcaagaacttgcaagcatctaaaccatctgcacggtgaacagatgagaccgcaatgagcacgctagtttctccaacaggaactggtccaagacggtgagcaacagcaatcttgtggatatcccaagttgatctagcagttgtacagatcgagctgaggcatcgtgtggccattggcacatatgcttcataccttaactccaacactgtcttgccctcgaacatgtctcttgtagtgcctgagaatgtcgcaatagcaccagcttgaggggcactgacataatcaatgtacttaacaacatcgactttgtgaccttcctccaagatctctataaggttcttctcctctgcagacatctttgatccaatagtaaacctcgatacaatcgatgt

SEQ ID NO: 207 - DNA, 710 bp, Arabidopsis thaliana
tttttttttttttttttttttacgaaatttctttcattaaaatttcgttgaaatagaaatagaaatagattgctacagaagcatacaaagcttggaaggcgggggacaacgtttacaaacaaaatgaaaaactataaaaatctcacacatttattttttctctttaacaaattaagattgatacataaactataccttacatgcatttattcaaactataataaatttcgaagacgatattgtgcactggcatcgcatcgtatgcataatggatattgctcaagcacattggaaaccagatggaagctttctgttacaaacgttgagaagaacgctgagagatatcggaacgttaaggttgataccaagaacgttagccctcagagcagtgcatagacaaatcgcagcgtcgacgtcaaccaaaccttggatgagcgagcaacattgttgagaggatggctgtcccaactggatgttgagtagactgcttaagacatttgcacatacaccgagcttgagagcatcaataggacagctgtttccggatgaaccaggggtgcgtggaggtgtgaccggcctaggattaggacttgggactgaaggacggggtggaggaggacattggaccggcttgggcttaggacttgggactggctttggtttaggacttggcttgcagttgcaatttgttgcaacggttaaggtgaaaa

SEQ ID NO: 208 - DNA, 710 bp, Arabidopsis thaliana
cttttttttttttttttttttgaaaattgaatggttatggaacaagtacatacacataaaagatgtaaaaccgccccatcaaccactgtcccaaaaccgaaatattaaatcgccaacttgaaaaattgacatgaaaaagaggacaagactttatatacacagactaaaaaaaaagtctttagacacttacgcactaaaacgacgtcgccgaattaaccttaattaacagctaaaactctcaccccctactacgattttcgaatgattcattaccatattcctcattctctaacgacgaagaaatcttcagtttcgttgtcattttcttaacctcatcgctcgaatatataaatatcttctttgccatcttgcaaaactcattccacggatcatcaccagcaagcatcatatctccttcatcatcagtgaagacaacgatccatttgtctcgggcaagaagctgtccttgaatctcaaacatctcctcaagctcatcaatcagttcatcgtaagatttcaacagtgttaaatcaaccgcacgaccaaccgcaatgccttgcatttgcactttagttcgacttcttgatgtttgttgcttcttctgctcactcattgaggttggagtgatgggttcttgacacttggcagctccacaagtatccatcggttgcttgtcttgagggattggagcaggagaattgcttgtgaga

SEQ ID NO: 209 - DNA, 710 bp, Arabidopsis thaliana
ctttttttttttttttttttaatgagagacaccttcattatcagtcacatgggttgcaaaaagaaacaaagcccaagtttgagttttacacttactcactcaccataatctctggttctttctttattcagtttttcttagatgaaaagattattatacatacacaaatccataggccttttcagtaacggcgtacactagttgtcgatagaagtactcggctctgtttcttccctctcttaccgggctctttgacggttggtgccattggtgttgttgttcttgaagctacactcgcgaaggatgttatgtttgtgtttcttgcacctgtggttgcgtttgagacttcactgctgctgctgctgctttgaacgtttgttggctcgttattcaggtttggggagtcgtgaccagctgcgaaaccgagccttgtcacatgtgagaaggaacttctctctccaatgtttggagggcttgatgatattggggcagagtttcccagagcttcaaagtcatccaaggaaaatgggggaaagtcatcactagaagacgactgcccaaaactggccatcaatggtacaagctctgcagctgcagctacttcagctttgattttattttttcgatccttccaagcacgttctttccgctgcttctcacgcttcttaatttcatgtataaatggagcaaatgcatcaggaggcaaggat

SEQ ID NO: 210 - DNA, 710 bp, Arabidopsis thaliana
cccgggcaggtagagagaaaaaaagagtgaggaaactagagagagagaccacccaataatggtgaggttcgagaaggttcatttagtgttagggttagctctggttctaactctggtcggagctccgaccaaagcccaaggacctgtttgcggtgcaggcctgcctgacaaatttagcagattaaacttccctgaaggcttcatttggggaaccgcaacagcagcatttcaggttgaaggagctgttaatgaaggttgcagaggtccaagcatgtgggatactttcactaagaagttcccacatagatgtgaaaatcataacgctgatgttgctgtggatttctatcatcgttacaaggaagatatccagttgatgaaagaccttaacactgatgcttttagactttctattgcgtggcccagaatattcccccatggaaggatgtctaagggaataagcaaagtaggagtccaattctaccacgacctcatcgatgagcttctcaaaaacaatataataccattagttacagtctttcattgggatactccccaagacttggaagatgaatatggtggtttcttaagtggtcgcatcgtgcaagattttaccgaatatgcgaatttcactttccacgaatatggacacaaagtgaaacattggatcacattcaatgagccatgggtgtttagtcgtgccggttacgaca

SEQ ID NO: 211 - DNA, 710 bp, Arabidopsis thaliana
cggccgccaaataccaggcattgttgtcgtcattctttttcttattacgagtcttaagaacaaaaaaatcatggaactaaaagcattcaacctccagaaaacttgacataggttaagaaacaacatgagaaaaaacttgtctgcttggaggatataagagatacgactagagagtgtcaaaagtagaaaagttataacaaaaagaacaaaatcccatggagtaatagtaaaaaaggtcttctctaggccactggaggaatcatctcagggtaatctacggttgtgagtggagcttcttgcacaagagtaactggagcagcagcctgagcaggtgcagagtagacaacatcatctttaggagcatgaatgatcacaacatcaggcaatggtgtctttggtcctgatttgcccgtagggtcccagtcaagcatgatcttcaccttgattcccaacaccccctgtctgagcaaaacatgtctcactgcagcatcgatgtattccttagttggttgaccagatgaaaccatgtaaccatccttgaacttcatggacttagcacgtgcagcacggagctttccactcacgatgacctcacatcccttagctccactctccataacaaatctcaaaacaccataacaggccctgcgaacagcaagaccaccgagaagcttgtaacgtagagactcagcctgagcaatggcacagag

SEQ ID NO: 212 - DNA, 709 bp, Arabidopsis thaliana
  misc_feature (1)...(709): n = A,T,C or G
gcactatcctgaattcaggaacacaaatttcaaaaaaaacaaaaatgataaagttcaaatcaggaagaaattgnnnttactcactcttcctcatcaccgtatggtttctcttatttttccaaacaaaaatcctaccccatcgaactcctaataacctttttcgtcattgtttaggctttggcttcagtagctgcgatggcaggagctggagcaacaccaccagtggttggcaggccaacaaacactttgaaggcatcgtataatccccactgtgctccagtcaacgtcccgatcatcacaattctaagaggaagccctcttgtgaacagtcccaccataccaatcttcttcaccgcatctccaacggttgctcccttagcgttgttgaggaatgacactagattgtctgctggatgagaaacgatggcacagaacactccggcaacgtaacctccggcaaaactcactccgagttgcagacctttgctgcactcactctttgggttggggattgcgtacttgtaaatcatctcaacaatggtctcaaaggaagcaaacttcatcatagtgtaaggaatctgacgtccccagagtggagcaagacccttatacaagcctccgtatccttcggacttgataaacttgggaaatccatcagacatccccctagcaaatccaggctgtgtctgaacacgaaccttcacagctt

SEQ ID NO: 213 - DNA, 709 bp, Arabidopsis thaliana
gaaggtatcaggaggagtattgggtgctgcaactgtttcctggatcttattcgagttacttgagtacaatcttctcacactcttcggccacatttcaattcttgctctcgcagtattgttcttgtggtctagtgctagtaccttcattcacaagtcacctcttcatatccctgaagttcacatccccgaggatgttgttcttcagcttgcttctggattaaggattgaaatcaatcgtggatttactgttcttagggacattgcatcaggaagagatcttaagaagtttctgttggtgattgctggtttatgggttttgtccaaagttggtagctcctgcaacttcttgaccttaatctacatcgcaactgtacttctcttcacgattcccgtgctttacgagaagtatgaagataaagtagatgactttggtgaaaaggcgatgagggagatcaagaagcaatacgtggagttcgacgtgaaggttttgagtaaggtgatgagcaaaattcctaaaggagcctttgcctttatcaagaagaaagattagagagtgtgtaagtttctctcatcatcattatccgagattattcaagattgatatataaatctcgaagcattgtttttttggctgttggttaataaccctttattctctcaaatatctgctatatggattttattcgggttttaaccaaattttatagca

SEQ ID NO: 214 - DNA, 709 bp, Arabidopsis thaliana
tttttttttttttttataaaataatgtatatcttattaaaaatgataaccattgaaaatagtacttaagaagattaaaaaaccaaaagcaagaagagtcatagactcaaaaacataacaagacacaaagtacttaaagtagcaaataaattacttgctaacattttcttcttcttttgtctttcaaaagacagtttttttcttcacatttactcatcagccttctccactggagctgtcacggaggcttccacggcgggtttctcctcctctgcctctggcttcttctcttcctccacaaccactggagcttcctctgtcttcttttcttctacttcttcctctttcttcgcctctacaacttcctctgttttgctctcatcctccacaaccaccggagtttcaaccggagcttcttcatctttcttgatctccacaacctccggagtttcaacttgagcttcctctgtttcttcgattggtttctctgtctcttccacgaccaaatctttagttgttacttcgacaggcgcttgagattctgttaccggagctggaagagactcggagacggtggtgacttcctccgactccacagcctttggtggtggcacctcgatgttctcagctgctactggagtcacttgttcaacctcgatggtggccatttgaatatatgtagagaaaagagttaaaagaactgagaaaat

SEQ ID NO: 215 - DNA, 709 bp, Arabidopsis thaliana
  misc_feature (1)...(709): n = A,T,C or G
tacatgaatcaaaacactcagaaagtagtatgtatcaactgttttttgtcgttaataaacctctataaatgatattattaaaccaataaatagaaannnngttaccaaaaacaaggactgcaaatgaaagagctgggactcgatattatttgatcagatatgtcaaacatggaatcagcaagcacaacctcttgactgatctggatcaataatatccgtaacagagtcatgatactggcctctaggatatatgtcattgctttgtttacgttcattagagagagcaatgtgtgcaacactcaaaaaagcttcatcgatattggtatcttccttcgcagaggtttcatggtacggtatgtttccctttgagccacaccactcgatggctctcttatttgaaacaactcggctgtttccgccatctacatcggtcttgttcccgatcaaaacaaagggaaatgtctccggttccataggatttgcctgtttgaggaactctgtgtgccagttattgagagtttcaaaagatttgagattgttcacgtcgtagacaagaacgcaacaatcagcacctctatagaacgcggcccctagactttgaaatctctcttgtccagcggtatcccatatctgtaaagtgacagatttttcatctatatgaagctctttggtcacgaaatctgctccgatcgtagccttatattgcttg

SEQ ID NO: 216 - DNA, 708 bp, Arabidopsis thaliana
gacaaatatatatctgaagaaaaaagtcaatacaaggccaaccctttctttagcaatgtctagatccaagagcaaaacaaaaaagaactacatatatagagaacatgtgagacaaaaacattgccttgcgaattaagcgattcccatgttctcacgagttgtatacggaagagaaaatctagtttgcttccattgagaaactcgtcagagtagactgtgaagaagtcactaaacagtgaattacttactcaccttcccaacctaattgccgagctctgcgctcccacaaaaaagtgatcttccgctctttgagcaacaatgcttgagctctctctctagctgattcgcaaatttcagtggcagcgttacacttctcagcctccttttggtactgtgaagcaacccttttagcttcggcaagtgtaacattcatatgacgactatgctcgtctgccactgcttcttgaagcttcagctcttctgtgagaagatccacaaacggcttctccatctcctctttgagctctggatcatcgctgccacaacctgtaatagagaggtttgcaagcccgggagcaatctggaggagagacaaaggaggaggacaatcgcagacacaaggaggacaaatggagttggtgctacgagcagatccaacgaaacccttattcaatttccagtaaagagcaggtccacacacaaataatg

SEQ ID NO: 217 - DNA, 708 bp, Arabidopsis thaliana
cccgggcaggtacccaacgcaaggacacatcacaccattccgccaattctgcaaacgacttcacttcaaaggtctcaaaaccactctcgctctcaccactttcgtcttcaactccatcaatcctgacctatccggtccaatctccatagccaccatctccgatggctatgaccatgggggtttcgagacagctgactccatcgacgactacctcaaagactttaaaacttccggctcgaaaaccattgcagacatcatccaaaaacaccagactagtgataaccccatcacttgtatcgtctatgatgctttcctgccttgggcacttgacgttgctagagagtttggtttagttgcgactcctttctttacgcagccttgtgctgttaactatgtttattatctttcttacataaacaatggaagcttgcaacttcccattgaggaattgccttttcttgagctccaagatttgccttctttcttctctgtttctggctcttatcctgcttactttgagatggtgcttcaacagttcataaatttcgaaaaagctgatttcgttctcgttaatagcttccaagagttggaactgcatgagaatgaattgtggtcgaaagcttgtcctgtgttgacaattggtccaactattccatcaatttacttagaccaacgtatcaaatcagacaccggctatgatcttaatct

SEQ ID NO: 218 - DNA, 708 bp, Arabidopsis thaliana
gttatttggtgatagggtaaagaactggatcaccatcaaccagctatacacagtgcctactagaggatatgcattgggaacagatgcacccggtcgatgttctcctaagattgacgttagatgtcccggcggaaattcgtcaacagaaccctatattgttgcacataaccagcttcttgctcatgcagcggccgttgatgtttacaggacgaaatataaggatgaccaaaaaggtatgattggaccagtgatgataactagatggtttcttccatttgatcatagtcaagagagcaaagatgcaactgagcgggctaaaatatttttccatggatggttcatggggcctctaacagaaggtaaatacccagacatcatgagggaatatgttggtgatcggcttccagagttcagtgaaacagaagccgcacttgtaaagggttcatatgattttcttggtctcaactattacgtcactcaatacgcccaaaataatcagacgattgttccttcggacgtacacactgccttgatggactcacgcacaactctcacatctaaaaatgcaactggtcatgctcctggtccaccgttcaatgcagccagttactactacccaaaaggcatttactacgtaatggattacttcaaaaccacttacggtgaccctttaatatatgtcactgagaatggatttagtaccccagg

SEQ ID NO: 219 - DNA, 708 bp, Arabidopsis thaliana
gaaatgcctgaaaaaaaagaccaactaaaactggctcactcgcaagttccagatttaagtaccaaaagacatcaaagttctagagtagatattatagagagtagtcatcatgctgcttcttcttctcaagcagctgcactgtgtttggcctttgtgtgagactgcaatcccatttccgaagtaaaggttctggtgcacgacttgcacccaaacgctcctgcagacttcggtgtctgctgctgcttcgatgtctctccagtgctgcctccaccagaattcttacccgcctgttttgagggatgaggagttgcaacatggacatgcggtttcttcgaatctgttttctgaggagttacaaacttagccttcttgttggacgcagggttcttggaggagttgggttctgcagacctcttcttgggttcttcaggcttctttggggtttcctcttctgaggagtcatcttcttcgtcgtctgatgagtcatcttcctcactgtcagattcagcagtaaccttctcttcctcctcgtctccagagttttcactatcatcatcatctgaagaatcttcttcactaccgtcagcgtcatcatcttgcttggctttgacatcttcatttggcaactgaaagttcacctgtttcgcagcagatttcggagcagctttgaaaccagcagcctcaagttgatcatcaatcaaatcctca

SEQ ID NO: 220 - DNA, 708 bp, Arabidopsis thaliana
  misc_feature (1)...(708): n = A,T,C or G
ctttgtcggcggccttgcctgggccaccaatgatgaagatcttcaaaggacgttctcacagttcggcgacgttatcgattctaagatcattaacgaccgcgagagtggaagatcaaggggattcggattcgtcaccttcaaggacgagaaagccatgagggatgcgattgaagagatgaacggtaaagagctcgatggacgtgtcatcaccgtgaacgaggctcagtcgagaggtagcggcggtggcggaggaggcnntggtggaagcggtggtggttaccgcagcggaggcggtggtggatactcaggaggcggtggcggcggatactcaggaggaggcggtggtggttacgagagacgtagcggaggttacggatctggtggaggcggtggtggccgaggatacggtggtggtggacgccgtgagggaggtggctacggaggcggtgatggtggaagttacggaggcggtggtggcggctggtaatcaaagatagagttgtttgcgtgctgctgctctgtttttggtttagatttggttttgtgtcaccacttctggtttggttatcgttcgtttggtttacttttttgatgaaacagtttcgtttaagtcttctttgtctggaacgaaatgttaattcgcgtgttgtttactaaatttataacgtttccttttaaccagattcgagattttccctcaaaaaaaaa

SEQ ID NO: 221 - DNA, 708 bp, Arabidopsis thaliana
ttttttttttttttatatgaatgttgttctgttaattaaaataccgggaatatcctctttttctttttattattacaatactttgcataaatgaagtaaaatccggtaggtgtcaaagagacaaccatatgaagagttaggtatttccggcagcttatgtacgacgaagtaataaaacaaaccaaaccatgtggtcaatatgaaaaagatagttcgcatttggtaccaacccattgatgactggagatgtgatcgttttattttaggtttcagtccttgagaagctctaatttcttcagggcatcacgaacatccgaatctggtgatgcgtgaaccacgttgttgctctcaaaggagatcacgtcggtgagaggatagctccggttagcgtgcaagcatgcactgcacgacactccctttagaacaacgctcttgtgaagcccaccaagcaatccttcgtaatcagtatcacctgattcccccacaaataccgccattttcgccatgtcaattccccaccggacgaacaaatacctcagagcttgtatacgagaagccagcaccggtatgacgtttattcgggtgccattctgactataaacgacatggcaacgtaaagcctggattctcagcagcttcctaagctctcttactggaggtaccgctgcaggctttttgactgtaaatgtgtagcagtagtcagttgaa

SEQ ID NO: 222 - DNA, 708 bp, Arabidopsis thaliana
ttttttttttgattcggacatgtttacttatcattacatcgtcatacatgatacccaacaccatccatcatatcatacatcctttccattatcattatatcacccccaccacaaacccaaaatcaacgaagagccaacatttagattaaataactcaaagccactaacatcataattaaagcattaaggctgaacacacaaaagaaggaggtggtcactaccatgatgtattcatcatcaccctttctttgatttaacttaaaagatttttttattcatcttggttcgtaccaagcagagaactcaacacaccagagcccctgtctttctcactttttccaacttcaatggttcttgtttgcgagattacattgcttcctgatctcacccttagagccagtcaaggggttgttctcggataagatctggattgccctagtgaactccttgaagaagtaggcctggtccttagccatcttcttaacgattggtctggttcgtttgtcgtgtgcgagctgatggtccacaaggagcaaacccttgttgtctaggatgttacggtagtaattgttgtctagcaccatgggggtgccacggtcgttacgcacgtactggaccgcctttgggtcagggatcgagtcaggacacttgtgtagcatgtgagggacgtggtccgggtttaaggacgggtccacctcagggtacaaa

SEQ ID NO: 223 - DNA, 708 bp, Arabidopsis thaliana
ctttttttttttttttgacgagtcaagagtcttcttcattccttgacaatgataatttttttgactcttattattcactgaagaacgaaacgaaacaatttgtgaaattgataactaaaaccaaatgcgtttatcttccttggaatgaagatctcaacactgcttaagtgaatggtgtacttattattgttatgattggctcacaaaatcacagtaagagaacagagaaagagaaagagagttttctttccaagccggagatggagaaacatgatcagtatccccagttgtcattacggatttcgtcatcaaacttctttttgagttccgggtgcttctcaaagtactcatctgcagtcatggtgctgagctttttgctgatctcttggacatcagcaatttctttctccaaccgttcagactccttgagcgatttctgttctgcttctttcagttccaccaacaaagcatcaaactttggcttgtattcaggagtaactttgtcaacgtactttggaatctcaatgctgtcataagcttccttgtacttgtcaacaatgccagctccaatacccttcctatagtaatcccaatctatgggttcaggttcctgactaaatttggtctggagctgtgtgttaacctcatcgaaagcacgacgaaggttagagaactctctacgagcctcatctgtgacaaggaccttag

SEQ ID NO: 224 - DNA, 707 bp, Arabidopsis thaliana
tttttttgtgattagcaaacacttggatcctaaaattaaagatcacatttgtctcatcaaataaattacaaagacaattcacatatgaattttttcacacatatatatatagcgtgatcttcactagttgatgatactcatacatgttcatcgttcttgtaactttccaagagaggagccttctgtgaacccgatggagaatcaaggtcagcttcattggcctcctcgtggttagccttgttatcatcttcgaccaaggccacttccttggcttttccccacattaccgtgtaaaacccgattgttattaccgttgccccgatcaagctgccgatgtagagagaatctcgcaggaagataactcccattgcaacagcaattgcaatagacaatggcttgaacattgcaacaaataaaggccccttgatccgcaatgcccacgtgtggatagtattgtttatgcaagatccaaacaatcccgagcaaacgatcgacactaaagctatattcggttttatcttccatgcacccaagtcattcccttcagtgaacaatgtgactagcgcggtccaaaagctaacaccaatgctataaaagcaaataacggtaaactcggccggatactctctcatgatttgagtctgaacaatgtaccacaatggaacacagaaatactcgaccgcaaggaaacccgcaccaagtatcca

SEQ ID NO: 225 - DNA, 707 bp, Arabidopsis thaliana
  misc_feature (1)...(707): n = A,T,C or G
aaaggagtggctagacaccacagatataaagtactacgagagcaaactgaatctgaactggagacagatcctaaagacgatcacagatgatccgcagagctttatagatgatggaggatgggagtttctgaacctggacggaagcgattcagaatctggcgggtctgaggagtcagacaaaggatatgaaccatcagatgtagaggttgagtctgagtcagnggacgaggcttcagagagtgagtcactggtggagtcagacgatgatgaagaagaggactcagagcaagagtcagaggaagagaaaggtaagacttgggatgaactggagagagaagctactaatgcagacagagagcatggagttgagtctgatagcgaggaagagaggaagagaagaaagatgaaagcgtttgggaaatcgcgacctggaactagcggtggaggtggtagtagcagcatgaagaacatgccaccatctaaacgcaagcacaggtgaagaaactcaaaaagttcgaattctgcttatcattgttctcattagagatgaaacgaaagtcagacatttactttcgcaggtttaaaattagtttttttcccttggtttgttggcaaacaaaaactagcgttttgttatcggtttttttatcagtcctttgtatcatatgaaaactacttaagataattttatcaattatatgccctag

SEQ ID NO: 226 - DNA, 707 bp, Arabidopsis thaliana
tttttttttttttttttttttttttaaagtaaccaatattttcttagaaacggtagatctcaatgtcacaatcctcactttggttttggttcaaccatctttagtcaaaagacatgaggaaacatatggtaccatcagaaaaaaaccatagtatataagccaacaaaaacggtgttctttttttttgtcccattttatttgtagaaacagcaaaaaaatgtatggtcgctagtttagccgaggcgggtcactgcagcatgcatagcatcggcaaggtgaggcactgtcttcgaacttagacctgccatgcttattctcccatcagaggtcatgtaaatgtggaactctttggtcatgaattcaacttgctccttgttcaatccagtaaatgtaaacatcccaatctgtttgataatatgactccagtcaccaggtgtacctctagcttgtatagcttcaaataactgttggcgcatgctctttatacggtcagccatttctttcagctcgatggtccagttgttgtacatatcactgctttttagaatggtggcaacaattgatgctccatgaataggggggctcgaatacatgggccgcacaacaagcttcacctggctctcaaccttactagccacatctgctgacttgcagacaatgctaagggcaccaacacgctccccataaagtcccatatttttggcgta

SEQ ID NO: 227 - DNA, 707 bp, Arabidopsis thaliana
  misc_feature (1)...(707): n = A,T,C or G
ccacgcgtccggtacagaatcaagtttccaagagagaaagagagtaaaagcaaattaacaaaggaagactctgattcaccgagaaggttttggcttaaagatgacgaacactcgcgcgatctacgccgtcatcgcgatcctggcgatagtaatctcagccgtggaatcaaccggagacttcggagattcgctagatttcgtgagagccggatcttcatcgctcttctctggatgcacaggatcgatcgcagagtgtatagcggaagaagaagagatggagttcgattcagacataagccggcgtatattagcacagaagaagtacattagctacggtgctatgaggaggaacagtgtgccttgttcacggcgtggtgcgtcgtactacaactgccagcgtggagctcaggcgaatccttacagccgtggatgcagcaccatcactaggtgcaggcgttgaagaagatgagtcacttgaatttcctattttgcccctttctttttgtgtctctgtctctcttctcgattttcatttttttaattatttttattttccgggatatatgggtttgattttacacattgaaaaaaaaacttctactatagtctttgatttgaaaggaaaaaaaacgaaattgcttctttgttttnntttctggttgttgtctatatacataaataaaaaattcaaagttgcgtagattaaa

SEQ ID NO: 228 - DNA, 706 bp, Arabidopsis thaliana
ttttttttttcaccatatcttccaggagtttcttatgcatctcctcttgttgagctatcatgttcctcactagaccctcacaaaacccttttaacacaccaaacctctctttctctttcttcctcttcttcctcttcttctccttcatgatcatcatcaagcttgatgatgatgatgacttggcatcatcttctacgtttccaacttttccaacctcaatagagtttctttgattctccattgatgcttcttctacttgaccctgatcctgatctcttaatttgtcctccgccattaagtcttgtaccgtttctcccacgtttccttttccttctactaaattggtcctcttgttttggttatccccaacttctgatgaaacatgttcattgtcatgaccatgatgataaaactcttcaacctcactaaatatcctataattatttcccttgttgttataattgccgatgtgttgatgatcattagtgttgttgttgttgttgttgttgctattgaaatatcttctctcttcttcttcaaatttctctttgcattcttgtggactcctcttaaaaccaacttctgccaactttcttgaagtatgctcccaagtgaattcagggaaccaattctccactgtagatctgaacctaagaagagcaagaacttcatcactacaccatggatgatgatgatgatgttgatg

SEQ ID NO: 229 - DNA, 706 bp, Arabidopsis thaliana
ttttttttttaccaaaatcatcagatgattgcaaaaacttgtaactgtgtgtttatatgaaaattgttccaaaaatctcaacaaaaacaaaaaaaaaaaacctcaaaggagtgatcagttggtcttaggatcaggcatggggaacaaaccaccagcaccagcagctcctcgcggcggagaaaaccctagaaatttctgtagattggttctgatactaattgaacacagcagatagagaaaagccatggaacaatccgtcggatcatcacctttcagtcccctgtgactcatcttcttcactatcgtgatcggatggaaaggaagcttcgcgacgactttaccttcgaatagtgaattgagcaatccgaagacgacgaagagaaccagtgccacaacggcgccggatttgaacttgaagagtgacagatctcggctcgattcctttaagctggtttcaacgcgatcgatcttcttcgtctttgatttctttatggatagctttgacgatggattctctgtcttcattgtctcgagtttcttcgtggccttgtcaatggagtatttcaaggatttgtatgagctggtacggtagattaagatccatgagatggcttcgcagaccaacgcggtgcagaaggagattcctacgaccgttaagctatcggcgtatttgaaagaggcgaagagtggaatcgtagtcgccatt

SEQ ID NO: 230 - DNA, 706 bp, Arabidopsis thaliana
cttttttttttttttttttggtaaaaaaccaggagacaagatatcgagtaaattgttcatcctcattagattttcttagctttaagtttgcaaagattttcaactacaccgcattggctaacaacgacatcacaatagaaaacaaaagcagtagctaacactcctagatttactttagactaattcaaaccatttaacacagatctcagaaacaagaagaaatccccaaacttgcataaaccctaatcccccaaatcggattaacctccgaaaccgtagagagtacgaccttgcctcttcaaagcgtagacaacatccatggcggtcaccgtcttccttctagcgtgctcagtgtaagtaacggcgtcacggatgacattctcgaggaagatcttgaggacacctctggtctcttcgtagatgagaccactgatacgcttgacaccacctctacgagcaagacgacgaatggcaggcttggtgattccttgaatgttatccctcagaaccttcctgtgcctcttcgctcctccctttcccaatccttttcctccctttcctcttcccgacatcacttcacagttttacttgatacccaaagatctgtgactgtgaagaacagaagaaaaattattcagtgaatggtaacgaacagaaacgctagatttccaaatcaatcaattgaattgacgatcgaacaataaac

SEQ ID NO: 231 - DNA, 706 bp, Arabidopsis thaliana
cggccgccgaagaagctcaagaagcgttaggtgttgatcgtcatgaatatgttcctgtcacatacgtctctgaaatggtctggtatcaagagttcatgaggtttgcaccgactttgttgctcttgggtactctgatctatggtgcgagacggatgcaaggtggattgggtgtaggaggaactggcggtaagaatggtcgtggaattttcaatataggcaaagctacaataacgagagctgataaacattccaagaataagatttatttcaaggatgttgctggatgtgacgaggctaaacaagaaattatggagtttgtacatttccttaagaacccaaagaagtatgaagatttgggtgctaaaattccgaaaggtgcacttttagtcggtccgcctggaaccggaaagacccttttagcaaaagccacagcaggagaatctggtgtgccatttctgtctatttctggctcagatttcatggagatgtttgttggtgttgggccttcgagggtgagacatttgttccaagaggcgagacaagctgcaccgagcattatatttatcgatgagattgatgctattggtcgggcaagaggtcgtggaggtttaggcggaaatgatgagcgtgaaagcactctgaatcagttgctagttgaaatggatggttttggtacctgcccggacctgcccgggcggccgctcga

SEQ ID NO: 232 - DNA, 706 bp, Arabidopsis thaliana
agcggccgcccgggcaggtccataccatcgcagtttcaatgtccgatatcttacgagctaatgaaggatccggtgattattgcctcggggatcacttacgaccgcgaaaacatcgagaagtggttcgagtccgggtaccaaacttgtcccgttacaaacacggttttgacaagtttggaacagattccgaaccatacgattcgaaggatgattcaaggttggtgcgggtcgtcactaggcggggggattgaacgaatcccgacgccacgtgtacctcggccgcgaccggcgcggagcggccgcccgggcaggtctaacaatggcgccttctccgatcatcttctccgttcttcttctcttcatcttctcactctcatcatctgctcaaacacctttccgtcccaaagctctccttctcccagtaacaaaagaccaatctaccctccagtacacaaccgtcatcaaccaacgcacacctctcgtccccgcttccgtcgtcttcgacctcggtggtcgagaactctgggtcgactgcgacaaaggctacgtctcctccacttaccagtctcctcgctgcaactccgccgtctgctcacgtgccggctccacaagctgcggcacatgcttctcccctccgagacctggctgtagtaacaacacttgcggcggcattccggataacaccgttaccggtacctgcccgggc

SEQ ID NO: 233 - DNA, 705 bp, Arabidopsis thaliana
ttttttttgttaattgtatgagtttctactaagaaactactgctggagttggtctaaggtaaccactaaaaggggatgttgtcttgcggaagtgtattcaatcaagcatttgaaatattattttttaaaatccgctattattgaaaacacttcaagtattggattcttaattattctaaagggattttagtagcttttttttgtttaaacttgcataccaatctcttaaaaaaaaaaagacaaatctaaatcccttgctttaaaatgggatttgaaaagatttcataataaaccattaaaaatcctaaatttacctaaaatcatcaaaatgaacccctcattatgttgggaataagaagccatagcttctaaaaattggtatcctagcgttagtgattcaagtgccatctgaaaaacaaagatgacccaactaatttgcttaaatctagcaaattcatttgaccaacttacaattaatcttggagcatatataatacaaataataaagagtccaaagatggaaatctttaatgtatcatatgcttgagactattattttttttcatctatatgctcataagaaatgaagtagtaatcaaaagtatattctaaacataactaagaattatctaaattatattctacaactcttttcatatttatagtcatggactagtgttgttcactgttcagatatacaatata

SEQ ID NO: 234 - DNA, 705 bp, Arabidopsis thaliana
gtggaagactttggtgaactggctcgcttttttctatcagatctttcttcagatccttcgtgccgttggttatcatcctcttctctcttcttctgctaaagcctccgctgatggttttaaacctttgccggctattgagttgcttgatagggcttccgaatctcccaccaccgttgaaatcgcagccacgacgacttctgattcctgcagcgatggtgcacgcagccgttttcagaggcttaaggtagttctagacttggatgagacgttagtttgtgcatatgagacgtcgagtttacccgctgctttacgcaatcaagcaattgaagcgggattaaagtggtttgagctggagtgcttatcaacagacaaggaatatgatgggaagcctaagatcaattatgtcacggtgtttgagcgtcctggattgcacgagttcctagagcaactcagcgagtttgcagatcttattctgtttacagctggtcttgaaggatatgcgaggccgcttgtggataggatagataccaggaaagtgctcaccaaccgactttatcgaccctcaacagtcagcacgcaataccgagatcacgtgaaggatctgttaagcacatcaaagaatatgtgtaggacagtaattgttgacaacaatcctttcagctttttgttgcaaccatcaaatggaattccatgtattgcattttc

SEQ ID NO: 235 - DNA, 705 bp, Arabidopsis thaliana
  misc_feature (1)...(705): n = A,T,C or G
ttaacagtcagcatcgttttgcttgcttgtgcgtttctctcgaactctctccatggcntncgctccaattcagccgattatgcgttcaaccggatactttcgtgcgggagaatcatctctctggatccggatctctccgccgccggaaagctttatcagtccggtgctcgtctggcgatgagaacgctccttcgccatcggtggtgatggactccgatttcgacgccaaggtgttccgtaagaacttgacgagaagcgataattacaatcgtaaagggttcggtcataatgnggagacactcaagctcatgaatcgagagtacaccagtgatatattggagacactgaaaacaaatgggtatacttattcttggggagatgttnctgtgaaactcgctaaagcatatggtttttgctggggtgttgagcgtgctgttcagattgcatatgaagcacgaaagcagtttccagaggagaggctttggattactaacgaaatcattcataacccgaccgtcaataagaggttggaagatatggatgttaaaattattccggttgaggattcaaagaaacagtttgatgtagtagagaaagatgatgtggttatccttcctgcgtttggagctggtgttgacgagatgtatgttcttaatgataaaaaggtgcaaattgttgacacgacttgtccttgggtgacaaagg

SEQ ID NO: 236 - DNA, 705 bp, Arabidopsis thaliana
taataaaccacacaccaaaaaaaaaacaatatattttgttgttgttgctaggagatttatgtacttgagagaaaacccacttgggaataaaactaaagctttcactaaaacaagataccaaaacatctaaaacctgaaacaaacttgatgaactatatactacactggtctactacgttcatgccttttgtctctcttacgaacttcttccaatgtctttgcctgaaaactcccctgatccaaacagatcgattccacctccaccacctatagaagttaacagagcagacaatccacctccggtattaccaccattaccaacagctcttcctaatccaagaaagtctagtgtcgtctgtttcggaccaaacaccgatgaattccccatcatgagctcttttagacccgatccgctaccaccgctgctacaaggtagtccaagtccaagaccaggagctaatgacaatgcatcatgattgctgagttccatagatgaagaagtagttgaaactatgcctaacccgcgaagcaacgaacctcctgatcccgtggaacccatttgtgcagctttttggagcaatgcagtagctgacattgccggttgaggagggagaggagttaggaaatgtggcggatctcgtattgttggtccgaacaaagaagggttcgtcgagagacagagagagatgggttccatggaggacg

SEQ ID NO: 237 - DNA, 705 bp, Arabidopsis thaliana
cctgcgatagatttcctcgtctgctgttattccccgaaggaaccacgactaatgggaaagttcttatttccttccaactcggtgctttcatccctggttaccctattcaacctgtagtagtccggtatccccatgtacattttgatcaatcctggggaaatatctctttgttgacgctcatgtttagaatgttcactcagtttcacaatttcatggaggttgaatatcttcctgtaatctatcccagtgaaaagcaaaagcagaatgctgtgcgtctctcacagaagactagtcatgcaattgcaacatctttgaatgtcgtccaaacatcccattcttttgcggacttgatgctactcaacaaagcaactgagttaaagctggagaacccctcaaattacatggttgaaatggcaagagttgagtcgctattccatgtaagcagcttagaggcaacgcgatttttggatacatttgtttccatgattccggactcgagtggacgtgttaggctacatgactttcttcggggtcttaaactgaaaccttgccctctttctaaaaggatatttgagttcatcgatgtggagaaggtcggatcaatcactttcaaacagttcttgtttgcctcgggccacgtgttgacacagccgctttttaagcaaacatgcgagctagccttttcccattgcgatgcagatggag

SEQ ID NO: 238 - DNA, 705 bp, Arabidopsis thaliana
ttgtcatcaaaaaaatttggtcaaaaattaaatcgacagctaaaagtttgaacataaaattcggtaacagaaaacagtaaagccaccgacgatgtaaagttattatagaaacgaaattcaatgtgttgttgactttcgtttctatgataactttggcagcttttgaagttaatgcattttgataactccaaagagaggaaaaaacgaatcatcagccaaaacgccgtcgtacaggctccaaaaccttcatcgtcttggcgtcttttgtcttgttgtgaatgtgagcagctgagcaatttctgaatctctctatcttcttctgtttcgttcattttaattccattaaatgcttaaaccccacattccattaatgctctctccttccacttcaatatttctttttatcatcaccaccgtccaaatttcatcttacatctctgccctacacgtgtctcttcttctccatctctccggcgataacagtgcctctggatctccgcatcttaaccggctcgatgagtgcggtgctgttctgaagaacatcggactcgtcatcgatttcgttcgccgcgatgagcttcccgtcgctggaatccgttctgatatcgggtaaaacactcccgccgatgatctccgtcggaagaacggtgatttcgtgcttctgtagtaacggaacgagaacactcttgatttcgatattaggtt

SEQ ID NO: 239 - DNA, 704 bp, Arabidopsis thaliana
  misc_feature (1)...(704): n = A,T,C or G
tttttttcaaaaagttatctcactttaaacccagatttcacacaaagccaacgaatcacacatacaaaggttctatgaagaagtttgttttagtctatgggaagtgattatataaattnggaatatgtatatgaatcttggaatacctgnnacgttctcataacccacgtgggaaattgttgatttgtccttcctccaacacatctttgccattaatcttgtaacctaccctcatccgcatcacaatgggtttcttccccttttggctatttgtaactctcatagtttgtttgatgtttccgttagctggaagagaattgctgctagcgggatccaggtgaagttgtagaaactttggaactgcagcctggaaaagaaattctgtgtacacgttaggagtaagatttatgaaattggccacaatgtctgtcgtttgaggattttctgattgctttgtgaagttgaactcaatcttcaaggagctgctttcaaatgcaacaatggacggatatgctgcactcttgtcctcgctctttggtggggtgggaccaaatccatccaataaatccatcatcgaagaaggcgcagtgggagaagtcaaagaaggcgctattggagcattgttatcttgaatagataataagtctccattcgccgagccattttgcacaggggcaggagttccgattgacaacagatccata

SEQ ID NO: 240 - DNA, 704 bp, Arabidopsis thaliana
ccagaaacctttgagatctatgtattgataaaccgcaccaaaaagaaaacagagtcgtgcacaaaatcaaaaaccagaagaacaagaattcaagaatgattaagctctataaagcaacgaattttacttcttctcttctttctcagcctcggcagccctcttggctctggcaccagcatgacgtgcgtttgtgcgctccaaacgaatcttatcgtaagccttgaacgccttcaaatctgcagtcagcttaactagctccatagctgccttgacactggcaattggcatgtaatcaccttgaacttgagtagcattggcaagctcctctggagtagaatcaccagccttgacttgacgggaacggcgagggaacaccaccaacttagccttgtaagtctttaacctttggacattggactgaagaccctccaaagaacggttcttgcgtcggtgatcaacagaaattccgattgttggagccaacttctttgggataccagcaaccttaagctcttcaagagtgaatccttttccagctctaactttcatgttgtacttaagtgtctgaccatgaacaacaggtcggagaggaccagaggtgggacgagggaagatcttcacagccttcttctgtctagcaacacgtctccttgtcttcctggcaggctggttaaaccaagtcttgacataattctgccagtgct

SEQ ID NO: 241 - DNA, 704 bp, Arabidopsis thaliana
  misc_feature (1)...(704): n = A,T,C or G
tgtcacagcttcaacaacatcctttaagaacaaaggcaataactgctggagttttgtctggtgttagcgatgttgtatcacagaagctctctggcatacagaagattcagctgagaagggttcttctcaaagtgatatttgctggtgggtttcttggaccagcagggcatttctttcatacatatttagataagttttttaaagggaagaaggatacacagactgttgcaaagaaggtaattctggagcaattgacattgtcaccattgaaccatttgcttttcatgatctattatggagtagtcatagaaagaactccctggacccttgttagagaaaggatcaagaagacttatccaacggtccagcttactgcatggacgtttttcccggtggtgggatggattaactacaagtatgtgccactgcacttccgggtcatcttgcacagcctggtcgcattcttttggggaattttcctaaccctgcgagcgaggtcaatgacactagctttggcaaaggctaagtgattaggaaacacatggatcgtgacagagancncaagccttgggactcattatgatcacttagtactctgtaagttaaagcaaatcaaacagctctgaaaccaaannnaaatctgtattaagatgataccattctaggatagcaatatgttttaagttattacaaacacattcaca

SEQ ID NO: 242 - DNA, 704 bp, Arabidopsis thaliana
  misc_feature (1)...(704): n = A,T,C or G
caccaaggaaaagaaattaagatttttgctgatgacagtagtttggctgtaaatccattctatgtgagatcatggttggatcttttgtcacaaacacctcgggtagcaccgtttctctcaaagaacgaaccattaatcatggctctgaagaaggaactagaggattatactgctgaagtgagtgttcaacatgaatctttagatggaagtttcaccttttacgactcaacaaaggctagccttaatatataccaggtggcgagtgtaacgttcgacttgctcttgcttctggttctaggatcatacttgatagtgcttttcagtttcctagtcatcacaactcggggtctggatgacttgataagcttatttcgccggcctccttcccggaaagtgaaaatgggatgattttcttccttttccggtaactttatattcttctcatacctgccttttggcgattcactctcagatatgttttgtgagtcgttagaatttgaatcatgaagaattcaaaggagaagaggcaacaagaaaaaatgagtgttcgttgagttatggcccccnnnncgactttttgtttggttgtatgcctctctataggctatatggcttctgattattttgcgtgggcggcaaagaaaataagatcgaacattgtagttttttctttggtttaaattagtctttttccattaaaaaaa

SEQ ID NO: 243 - DNA, 704 bp, Arabidopsis thaliana
  misc_feature (1)...(704): n = A,T,C or G
ccacgcgtccgatcaattttgatctaacttgcgccttggcacaagcaccctcgtatcccggtgtggagcatgttgccggagatatgtttgtggatgtcccaaccggagatgccatgatcttgaaacgtatacttcatgattggaccgacgaagactgtgtcaagattcttaagaattgttggaaatcacttccggagaacggtaaagtggttgtcatagaattagtcactcctgatgaggcagagaatggagatatcaacgcaaacattgcctttgacatggacatgttaatgttcacacaatgttctggtggaaaagagagatcaagagctgagtttgaagctttggctgcagtttctggcttctcccattgcaagtttgtttgccaagcttatcactgctggattattgagttctgtaaataatatgtctatttatatttaaaattaaatcctcataattgttcatttcatatgtatttcagttctttgtttgaaatggtcatgcctctctttgtctttagagtagtatgaaataaaaataatttttttttgtttatgaatagtacccttttattttatggtgtgttggtaaaatagtcattttttcaaacttaattaagaaaatagtcattttnnnatnnnnnatcaaaaaaaaaaaaaaaaaaaaaaaaaaaaaaaaaaaaaaaaaaaaaaaaaagggcg

SEQ ID NO: 244 - DNA, 704 bp, Arabidopsis thaliana
cttttttttttttttttttttttttttatggaaactgtaaatatatttttacctaacctttttggtaaatttggaatatctttcctgaaaaaacagtacccacaaattccaaatccaaaggatactaacggtaacggcagtaacaataacaacggtccacgaaacccaaacccatctgggtatgacgtcatcagcgcctccgctgacgtaaaaccacgtcatcttaacgataagcaacggcgctagaacgcacctgcagacgctataggacgcgtaaaacggcaccgtaacgaaccggtgcaaactcaccgctagaggcgcgtctttcccacgcgcatccgcgagcgtccacgtgttctgacacgcgctcgtggcctccgcgacgactagcagcgcgagcagagcgcaggcgccgtgagcaaccatgtaacggcaggtgaggaaaacgaaaagcacggcgaggtgatgagcggcgaaaagcgagtctccgccggcgggagaaggaaacacggcaaggtggacgagatcagcgaggaaataagcggagctgaaatcgagaattgagttttgagattgggtgttgacggaggagaatccacggttaggatcggagagtaaggcgttcgtggcgaggacgacggcggagacgccgtggaggagggagattaaacagctggaagctaaaggacgagtctccggagtcc

SEQ ID NO: 245 - DNA, 703 bp, Arabidopsis thaliana
  misc_feature (1)...(703): n = A,T,C or G
gcgaagccaaagaatccgttacaagcaccgctgaatccgtcacggcttctctcactgatgctgagaaaaccgttaaccaaaccgccaggagcactctaactgacgccgagacaaccgttgcagcatctgttgaaacggtcaagaccgaggctgcagccgcaccagacaaagcgtctggtgtgtctacacaggctaaggatgcagtggacaaagctttttctagaggtatagaaggagccaaatctttgcttcaaactttcgaagcgaagagcagcgatatttcctcaaagcttgttggaggtgttaccaatcttgtgagtggagcatcgagcagcaccgtggcaaaccgagaccttccagtatctacagacaaccagcctctgctagcgtctggtgaaaagacgccgtggtggaagaattgttgtggagttcttgatcttttcaagaaagatacttaagttaaaaagataaaaaaaaatgacaaattaacgaatttcacgagatgaagaaacagagcnnnagaagaagaaagaacccnnntccttttgattatttatttccttcctttttgattttgatttgagattgtgtctatctgtttttgtttgttttttgttttgttgatatcttgattgtttcccaaaaacttgtgtaagaacaaaaaaaaagaccaaataaaaagggttatttctttgtgaaaaaa

SEQ ID NO: 246 - DNA, 703 bp, Arabidopsis thaliana
ctcgattccgtcaccgtgacccgcgtgttttctctgccgattgcggcttcggtctcgtcttcttcagctgctccgtcggtttcacgacgccggatttctcccgccaggtttctggaattcagaggtttgaagtcttcgcggagtttggtgactcagtcggccagtctgggtgcgaatcgtagaaccagaatcgctcgcggtggacgaatcgcctgtgaggctcaggacaccactgccgccgccgtcgaagtaccaaatctgtctgattcagaatggcaaacaaaggttctggaatcagatgtcccagttctggtcgagttctgggcaccatggtgtggaccttgccgtatgattcaccccatagttgaccagctagccaaagatttcgcagggaagttcaaattctacaaaatcaacactgacgagagcccaaatacagcaaaccgttacgggatacgaagcgttccaacagtaatcatcttcaaaggcggtgagaagaaagatagcatcattggagctgtgcctagagagacgttggagaaaactatagaaagattcttggtcgagtaacaaaatttgactcttttgtcactctgaaccattttaccttatcttctctcttgtaatctctgtaaagtcttttaagtttttgactattatgttatcgtgggtcctctttgtcttcttcaataaaaagcggccg

SEQ ID NO: 247 - DNA, 703 bp, Arabidopsis thaliana
tatcaaagcagagctcaagaacacaagcacaggcccaaagatccatagcatcaaaggcaagcccatgtagaacagcctattacctaccgtattgagcaagaaagctttctcgagtagttcagagacatactcgggagtcacaaagcttcctatttcgccgaaatcatcagaaaaaggttcttgaggagcgttaataaggatgttgacttggttgatgaagcgaatggagagagaatgagagaagaaggcgaagaggaagattgtgaggatggttacgtatttgagtgcaacagtgaagtcaccatgagctccatatacggcgtcgtttaaaggtttcttgatgctataagtactgcttaaaacggcagcgagacctgcgcagaggaggatgcaagtggttgccattaacgtccctcccattatcgtgtttcgtagtgtttgtaccgctaagatgttcttcttctcgttgtccttcatgatggctgctacccaagatcgacgggcgcgggaatttgtaccaacaatggtgcagaaaggatcggttcgaaccttataccacaaatagatgtggtaaccaaacatcataagtaaagcacttggcacaagaaccgcatctaagtaccatttctcccactccatttgatctctccttttctatgtatataatcttctctttctttcttgttctcgttatctccaaagc

SEQ ID NO: 248 - DNA, 703 bp, Arabidopsis thaliana
tttttttacattgggaataaaattgcagaaaaccaaaagtttcaaatcttttatatatgattccataagagtaagagtacaaagctctttgcttctgcctgactgatatacaaacaaacaaaaaaagccgacctctcatacctgaaagttgaaatgaaacaacaaaaacagcttcttacttcattccttcgctgagacccggtggcatgcctaagctctgcgcaaggtcactcattctctctttcatagccaccacactcttggcgtgtgcgtccttgtatgcttctgtgacaagttgtgatagtttttcggaacctagttccattgctgcctcggtaatatcggtacggattggttgctggttacctgataacgtaaccttgacaagctcgcctgcacaataaccatcaaattctgcggcagctaactctttttggacacgtacagcttccacttgaacaaccatttgagctttcttcacagtctcatacatattctgcatattaccaaatattcctgcctttgattgtccatcttcactgttattatctttgtttccacctccaaataatccattcactcgaagagccctgtaaccatttttagacttgtactcctttggccatgttcttctctgcgaattcaagctcgcatttcctgaaacatgagagaaaggaaagagcatagatttggtgaaattggt

SEQ ID NO: 249 - DNA, 702 bp, Arabidopsis thaliana
cgaaactacttcttttccattacgaattatacaaaattggaaacttcttaaaaattagattaaaaaccaatatttaattattccaatttctggtattcgaaaattgaaattgaaaaaaaaaaaaactgaaaatctaggaattagggtggaggagattgtggaaatgaacaagaagaacacctgacgagaccattctcgttacaggttaagcaagttctgaaccctagcttctccgtatgcaccttatggctaccatgacaatccttacacggcacgaatctatgaccaccacacatctcacatacccctggttcaatcttcggcaactcttgcacaagtttcttcaactctccgatctcgtgtagctgtttcacctcctccgctcctcctatgtaccgaccaccgatgaagactcgcggcagcttcggcgtcttcgcctggttctggttctggttctgatccttcccgaagattcgttgtagctcggtggagaatgacgcgtccattgagagatctcgttcgtcgattcgtaccgggaagctatggaggatcgatgtaacggatttgcaggcttcgaatgttggacgaaccacgcgtaggcttgtgaagtatacgacaatgcttttctctgcgcctgggattgaaatccgtacatctggttcggttttggttttcgattgtttcgaatctgattctggattt

SEQ ID NO: 250 - DNA, 702 bp, Arabidopsis thaliana
ttttaagaagaacttgtaagctattaattcatttaccttgttagaatgctttcttccccccacacaaacaaaacaataataaatcggaaaagatctaaaacccccacaaaaaaaacagagtaagaaactgaagcagatcatctctgaggctggtcagaggcagaagctccaacggaaggtgtagccgtgacagcgctggctgagccattttcaggcggtggagctactccccatttaccttctgactcaagcggctcgaatatatggacccctccgtctgacagacccactgcaaacatgttggattcttgcggatgagccgctatcaccagtggatggacattcgagttgctgagagaagctggcaaatatgcagagggattgactctgcaacgcaatcgaaggtttgcagagctgaagacgcatattgtagcgtccatgaaacttgtgtatatcaattggctatcacatgagaatgtggcatgtgttattggagctgctgattcacgcacaggccactgtttcatgcattcaagcttggttgtttcgtatatagcgagctgagtttcatggaccacaaggaagtgtacttgatcttgatgaaactgaacacgcgtgtctgacaaagaagacgtggatcttccctgtggaatttgcagaaccttgcttttctgcttctcccatccatccgtgttccatacg

SEQ ID NO: 251 - DNA, 701 bp, Arabidopsis thaliana
cggccgcagggttcatcttcaatagacgatttggggtccttacacaccattttaaaaccaaagacaacatcgaacacaagaccgaaacaccgatagaatgaagttgtttataggttcataacttcacaacacaatgtaaaaacataatcaagtaccagtaccatcactcaaaaataacagaataagagaatagatctttcaaggggatgatgataataaactttggtttttactttttagttggcacggctcctgaaaacatcgagatccatctctgttggatcagttgcctgtagctctacttgaatcccatctagttccctcttgaacctgtccttggagctcgcgtagatcatcttgcttctcaccttagcaatatccggacaccacgcgatgaagaagatcttgctcttctggcaattctcagcagttacaaagtcaaaatcgtaaatggcgtaacggcattcatcagctggaagacatgctgcaaactcctcgtaagtttggatcggttgaccaactttctcaacaacaacttgcttctgcttctcctcaatcttgtaaactatgaaacggtgtgtccttttagccttcagttccagaaatctcagcttgcaatcatcatgcacagccattccagatgccgcgttcgccatggctagagaaacactaatatcagagcaaattcgtggttaaacgag

SEQ ID NO: 252 - DNA, 701 bp, Arabidopsis thaliana
ccacgcgtccgtttcacggtttcgcgggcaaccatgttaattccattggagcttacttcgttccaaaatcctccaccactcctgttccttcaacccctttgaagctgaccgcagaaggtggtgagacaggagctgtatgggacgatggttctcacgatgatgttaagaaagtttatgtaggacaaggcaggttatagtattagcgtttgcagtaatcttactgatgcaggtgacgatagtggtgctactgaaaaaaggaggaggggggcaagtggagtatcatgagaggtacgacgagtacagtgtaaacggggagactttggggtggttagagaagagaatgcatttcctgagggaagagatgatgatggttgaggatcgtttgcagaggatgcgacaagaccatgccgccttgaaggctcagttccaccatttggaacgcctcctccgccgcaacaaacagtaaatttgctacaccctactctctgtttgtgcagaatgcggatggatatatgcatgtatgtatgtaatgtattatcggacgttactttgcaaagttgttgttatacctacctactcatatgaatatgagcagagactctgttaaacgaaatgatgtaatcaattgtattcgtgttgcacctgtatcaaagattaaattcacactggtgactccactttctcgcaaaaaaaaaaaaaaa

SEQ ID NO: 253 - DNA, 701 bp, Arabidopsis thaliana
tttttttttttttttgctatttctttctttattgacttttaaaacaacataagagacaaatttagaagaagagaggaactaataaaaagtgtacacaaaaagcctgtgaaactggttcaggacacacacaagacaaatgcctcaaagacaatatgagcttagagctttcctttaaccagcagagctcaaaggaaagcatccttctcaagcagcttcaccacctccagctggctgttgagcttcgctacatcaattggcgtcttctcgtctaggttttgcagagtgactgcagcaccattctccaggagaaggcttacacactctttcctcccgtaaccagcagcataatgcagaggtgtgttcttgtttttgtcaaccgcattaacacttgctccagcatcgataagaacttgagcacatttcaactcgccgtatccacaagcaaaatgcaatgctgtccttccttcagaatcttcttcatctttgttaccaccagatgccaaggcagctttcaaaccctcaacatcaccaagactggcagtttggtgaacaatagactcttcttcttcaccttcttctgctacctcaggttcagctgaaacagtctggtctggtaagccagcaacaggcatacccattgcttcacccagctttttcagcacttctggatcattccagtacttcatcatggcagaaggacc

SEQ ID NO: 254 - DNA, 701 bp, Arabidopsis thaliana
tgaattgtgtttctgaagtttccccaatggctgcttttggagatgacattgtgattgtagcggcatatcgtaccgccatttgcaaagcgagacgtggaggtttcaaagacactcttcctgatgatcttcttgcttctgttcttaaggctgtagtggaaagaacatctttggatccaagtgaagttggtgatatcgttgttggtaccgtgatagcgcctggttctcagagagcaatggagtgtagagttgcagcttattttgctggttttcctgactccgtgccagttagaactgtcaatagacaatgctcatcaggactacaagcagttgctgatgttgctgcttccattagagctggttattacgacattggtattggtgctggagtggaatcaatgtcaactgatcatattcctggaggcggctttcatggctctaatccaagagcacaggatttcccaaaagcccgtgattgtttgcttccaatgggaattacttctgaaaacgttgcagaaaggttcggtgtcacaagagaagagcaagatatggctgcggtggagtctcacaaacgcgctgcagctgcaatcgcgtctggtaaactcaaggatgaaatcattcctgttgctactaagattgtggaccctgagactaaagcagagaaggcaatcgtcgtatctgttgatgacggtgtacctgcccgg

SEQ ID NO: 255 - DNA, 701 bp, Arabidopsis thaliana
gaaaaagcatagaaacaaagatagggaacatatggataataaagaggtgaagtaatgtttttgtttgagattaaagaggtttcaaacaaagagatgataaaacataggaatctaacttatttcatggaagatccctatgtgaagaagtcctctctctttctctctctctctctattaaaaccgagtctgtgagggatcaaaggacacaaactttcatcccattgcatatttctgagtccagcttctcgcagtagactcatactttgctctatcggttttgtacatgtgagcaatctctggaaccaatggatcatctgggtttgggtccgttaacaatgaacatatcgaaagcaaaaccttcgatatggtgagtgcaggactccattgttctttcaaaatgtcaaggcaaatgcttccattgctgttgacattagggtggaacacttttgtcctgaatgcaacctttggtggtttgaaaggataatccggagggaagtgaatggttacgagaaagacaccgcctgaataaggactatcagatggacccattattgtagcttgccaatgaaacatgtcttcagcaactgggccagcactgcaggaagttggaggatccttctggagatccttgagctctttcaagatccttttcgaagccatttctcaaccaaaaaaaaactcctcaagacagatcctccaaa

SEQ ID NO: 256 - DNA, 701 bp, Arabidopsis thaliana
  misc_feature (1)...(701): n = A,T,C or G
aattcattcccaaacaatgtttttaacttcatgccagtatatagatcagcaagtctaacttaacccctgaaatatanctctcttctttcctagttttaagagatttttgttaaccttacatgatgcaggaggaggctcttcatcttcatctgtatgcattgggtaaacgataaccagacataactattttgtcagcaaacatcttgcctgtcttgggcatgacatgccagtgcaatgtcaagttaaagtccttccctcggaggttatgtccctgatctatgaaacggtacttgtttgagatttgtatccagaatttggcatgctctctctcgggtattatggcatcccatagtgaaacctgattcagggcgttcttggaggtttcatactctgctgctacaaaagcaaatacctgctttgtgttccaagtaaatagcgactgcaagtctgctgttatgttcagtgtcaaactgacctcatcatttccatgaggttgcttctgaaaccaattgatattcaatatctggatctgagcagagggattttggttactgaagttatcagagaaggaagcaatcgcgcaaatgaaagctagaatcgtgacggcgaatgtgagtagagcattcgctctgtaaccaaaagaatgcatcctctttcaatcggagtttggtctcgatctccaaaacctttctctgctccga

SEQ ID NO: 257 - DNA, 700 bp, Arabidopsis thaliana
aagctggaaattaaaataaataagactattcaaggcactggagggatcaagaatgaaaaacagaggaatgtgatcacaaaaagctcgaaaagcgtcacacaaaaaggtcctagtacgaaataaaaacaggtccttatgaagtatccaatacagaagtaagtagcaacattggatctttcttaacgcttctttgagacaccaacagtctttcctctgcgaccagtagtcttggtgtgttgtcctctgacacggagaccccagtaatgcctcaaaccacggtggtttctgatcttcttgagacgttcaagatcatctctcagcttcatgtcaagagcattggagacaacttgagaatacttgccatctttgtaatccttctgcctgttcaagaaccagtctgggatcttgaactgacgtgggtttgcaacgattgtcatgaggttatcaatctcagcagcagataactcaccagcccttttgttcatgtcgacatcagccttcttgcagacaatgttagccaatcgcctaccaatacctttgatagaggtaagggcaaacataatcttctgcttaccatcaacattagtattcaacacacgaagaatgtgttgaaactcctcatttgcaaccagagacattttgattagcagagatgaggtttgtgagaagaagaagccgtcttcaagcaataaacgatcgc

SEQ ID NO: 258 - DNA, 700 bp, Arabidopsis thaliana
tagaccggcattgaacatgacaataccgatgagtgtttttgaaggatctggaaaagatcatcatcattttgggcgggtagtaggtgaaaacggtgaagaagtgttggatgaagagaatggagagcaaagagaggttcaagtgaaggtcctagtgaagagaggaaacaaacaacaaacaaggcaaatgctaatcccgagtgattgtgctctagtgcagagcacaaaacagaaagaagctgcagaattggaagagaaacaagacataaagaggttagtactcgagtacaatgagagggatgaagaggaagcaaatgggttaggaacacagatattgaattggacttctggaggaagcagaggatccactcgaaccggggaaggcagtgggaagagtggtgggtctcgtcaccggttttattatcatcaaggaggtggtggttcgtatcatgcccgacgaaagtaacttcatccggtttagggggaaaatttgataatcttgcctgtgtcaaaagcggtaatagttggctttttgctacggctgaaaaggacaattcacaagaaatctcatgagtttctgtgacaaaagttgatgtattcgacttcacattctgtagtgttggttaagtaaatctctgtgtgtgaccctttttgtccagcttggttaaatcttgcatttaatgattatttagcatcattctca

SEQ ID NO: 259 - DNA, 700 bp, Arabidopsis thaliana
agaagcagaagatgacattagaaccaagactaacattacatagaagttgttcaacaaaccaactctcacatattcatccataaccacaaagattcaaaccatgtttacaagaaacataaaccaatactcatagaattgttgcatataacattcttactcaggtgatgataatgattcacttaacaagcatgttctgagcttgattctcctgctgctgctgatagttaagaggcctcctgaatagcattatgtgcggctcaggtcgatgaaccgcgtaatgtacccatccgcggctttgctgcactcctatcgctcgccattcgttcttcgaaattccaaacatttttaccatcaccaccaatcaatacaacattgaagagattgcacaacacaaatgtctaaaatctctttatcactaaaccttacaaaatcccaaagcaaagattcaaaatcgtaacagttgcaatttggattcagagcaaagattcaaatcctaaacctaaacgatctctttttcgatttttcccaaacttaatttcttaagagcaacaaattttcatagtcttcgatgatctaatcgaaggatttagaatcagaaatcagagaacaatgcggaaaaaaacttacttcggagagaagacgattctttggaagaagtttagcgacttcaggaggaagaacgacgtgcccggacgcgtgg

SEQ ID NO: 260 - DNA, 700 bp, Arabidopsis thaliana
ccaacaaagcccatctacttatatataaattcacccgggacccagaatgagaagatggaaactgttggatcagaaacagaggcttatgccatagccgatactatttcttattgcaaatcagatgtatacactatcaattgtggcatggcttttggtcaagcagcaatgcttctttctctcgggaaaaaaggttatcgtgccgtacaaccacattcatcaacaaaattatatctgccaaaagtaaacagatcgagtggagctgccatagacatgtggataaaggccaaggaacttgatgcaaataccgagtactacatcgagctgttagctaagggaacagggaaatccaaagagcagatcaacgaggacatcaagcgacctaaatatctccaagctcaagcagccattgactatggaattgcagacaagatagctgactcgcaggacagttctttcgagaaacgggattacgatgggacccttgcccagagagctatgagacctggaggaggcagtccagcagctccagccggactaagatgatcaattcccaccagaaagaaagaggttgaatcctaatttcctagtcactctggaatatgtagctcttacaatctataagcaaacacatgtggtagtaacatacaaaaaagtgttggcaaaaagggaaataacatcaaaagttatctaggtggaaagt

SEQ ID NO: 261 - DNA, 700 bp, Arabidopsis thaliana
ccacgcgtccgatcatcggaatttataattttcttctctgagaactataaaccaaacgagttgtccaaaaagaagagatcaaagtttcttcttgaagaaagaaagaaacacaaaagctatggcatattcaactaaactttatcttcctcttaaaacaccatgttttgttccaaagacagtaagagcaaagactttgatgcttcaacagagtcaagttcatgttaaagtcaagaaagccacagtttcacagcctcagccgatcagatactccaccaagaacattgtttttgaagatccgatacaagggatcatctgttacacagatgataatggagaggttatatgtgaaggatacgatgaaggtcctcgttgtcccacacagagtccaatggtagcttcttactcaagagaggtggagattcttgatcttctgcaaagaagttatcaggagctgagcgattcaaacaaggatggtcaaagaccgataattgcttcagaacaagagttcatgatgatcaaatggagcagctttgacttcctctaaatcccctttcttttttcttcatcgaaacatcaaaatctggttctctcttcaaaaaggcctcttgaataagaatgtacagaaaaaaggctatgaaagaagcagcgatttgcttctttcttgtttctcttttgtaagaaacttacgtccagattttga

SEQ ID NO: 262 - DNA, 700 bp, Arabidopsis thaliana
  misc_feature (1)...(700): n = A,T,C or G
gtgtcggagctatggaggaagaagcagtcggatgtgatgaggtttcttcagagggttaggtgttgggagtatcgccagcagccttccattgttcgtcttgttcgtcccactcgtcccgacaaggctcgtcgtctcggctacaaggccaagcaggggtttgttgtctaccgtgttcgagtcagacgtggtggacgcaagaggccagtgcctaagggtatcgtgtacggtaaacccaccaaccagggagtgacacagctcaaattccagcgtagtaagagatctgttgctgaggaacgtgctggnngcaaactgggaggccttannnttgttaactcctactggctcaatgaggactctacctacaagtactacgagattatccttgtagaccctgcacacaatgccgtccgaaatgatccaaggatcaactggatctgcaaccctgngcacaagcacagagaactcagaggtctcacctccgaaggaaagaagaatcgtggtcttcgtggaaagggtcacaacaaccacaagaacagaccttcccgcagggcaacctggaagaagaacaacagtatctctctccgtcgttaccggtgatcagttttatgttttgttttttctcgaactggtatatcttcagtgtggattgtgtttcggaattctggaattacattgggatggaagactttcacattcaaga

SEQ ID NO: 263 - DNA, 700 bp, Arabidopsis thaliana
caaaatggccacaagcgcatcagctttgctctcaccaaccacattctccactgcaatctcccacaaaaaccctaactccatctcattccatggccttcgtcccctccgtctaggtggctcctcctccgccctacccaaactatcaaccaccgggagaaaatcctcctccgctgtcgtgagagctgagctaagcccttccatcgtcataagtctcagcacaggtctctccctcttcctcggtcgtttcgtcttcttcaacttccagagagagaacgtagcaaaacagggcttaccggagcagaacggaaaaacccatttcgaagctggagatgatcgtgctaaggagtacgtcagtctcttgaaatcgaacgatccaattggattcaacattgttgatgttcttgcttggggttctattggacacatcgttgcttactacatcttggctacttccagcaatggatacgacccaagcttctttggatgattcgtttcaatgtcaatctctcgtatatgtatatgtatatgtttgacttgtgttgcaagctatctaatctgttctctatctctgtttcttcttctgttgttgttgttgttgtctaagacttgtccctctttttgcaaatgttttatttctccatttacaaagattggtttgcagagttttataagaagaacataatagtatatacactatgga

SEQ ID NO: 264 - DNA, 699 bp, Arabidopsis thaliana
  misc_feature (1)...(699): n = A,T,C or G
ttttttttttttttttttaacacagaacatgagctttactcattttattttattttgaactgatgagctttgctcatttttacaccatttgattaactcaaatatgaagaaaggctaacgtcataggaaacttaatcctcggattccaactctttcttcaccttctaaaatgatgcaaataatcttaaaccaaaaaagtaaannacaaatttacaaaaactaacaagattattgatcaagcagagagagacgggaaacaactcccagatcggagaagcgaccgtcgtgactctacgccgtcgatccccggtaaagctccacttgagcttgtcctcgtggtggttctccgtggagaaccgtcgaggctccgccgtagaatcctaccaatgacggatatcggatcttcctcttcatcgggactccaagaacggaaacggtggcaaaacgtcgtgtggcggcggagagcttcctcgacggagatacgagtggaagatcgaaccacctcgtcttttaccgcttccgcgcaaagcccacaaagccagtgtcccttatgccgttctttgacacggtggatgtaagctggcgtacactcttcagcgaaaccgcacgtgtcgcacgtgacagactccaccgccggcaacgaagacgatggctttatgttagtatcggtggctgacgatgatgatgatgatgatgaca

SEQ ID NO: 265 - DNA, 699 bp, Arabidopsis thaliana
ggtaccagtggtcttcgtccattattgtagttctccggcatcatctcctcaaaaccacggtgaattattggcaaaacgattggggtaactggggaacgggcgatgaggcttgcagttccccatttaagtcgtcttataggaacatcatcttgaaacacctttccctctgggaaggtatgcagccaagatccatcttttaatcgctggagagcttcattcatgttttcttggtagattccaccacctctagttataggtatacattttccagtgcggaaaatgtaggagaatatagggttcctgaaacatatatcctctgcagcaagaacccaccgagccaattctggatctaaggaaaggagacccttaaatgccccccacattactggatcatccaaaagtgatgagaggaacaccaggtggtcttgactggacaagattcataagagtatctgcattgtgaactgagcttttattgcaaagatttgctactgcttttgcaaatgcactaacagccattatcacagtattccttggaattcctcccaaatgatcagatcttgctgcccattccattatcttccccattagcttcaaagttctctccaattagaaacgagaccagacgattggtgttagagggaagtcgaagaagcttgctttggaggaattcatcgagagagaaacacctgcccgggc

SEQ ID NO: 266 - DNA, 699 bp, Arabidopsis thaliana
ccacgcgtccgagcagagagaataatggattatagccttttagttggtgttcacttccgtgatgacaacacaggagaaaagatggggctttctccattcgttttgagatctggtaggatagattcatatcagaatgaaaaattcatgcgcggttgtcgcttcctagaggcagaacttcaagacatggaccggattttagctggcaggaaaccatcgatcagattaggcgcaaacatgccagcaaaagctgaacgaatggcccggagaagcgattttgatcagtattcatcaggaggagccagttatccatcacacggtgagatgtacgaagttgttctctactttggagtcattgacatcttgcaagactacgacataaccaaaaagatcgagcatgcgtataagtcactgcaagccgatcctgcttcgatctcagctgttgatcctaaactctattcaaagaggttcagagacttcatcagtaggatcttcattgaagagggctaaagacaagaaggctaaagtttttaactaacattctcggctctacggaaatgtgaagaaagctgcgcgggaagagtaaaaaggtaaatctcaaggatagaagaaaagcgatttcggaattttatgtttatatattttgagatgaccaatcaagtttttgggttggggaggggctttatttatttttgtggtgag

SEQ ID NO: 267 - DNA, 699 bp, Arabidopsis thaliana
  misc_feature (1)...(699): n = A,T,C or G
cggccgccttaactgatacacacacaatcaacgttactcatgatatctaatttcactccttactccttcattgagagttggacacaaaatcagtatgacaagaaattgaggatgatctcttaagaaaaactctaaaagtaaatacacatttctcttgttgtgacacaaaaaggaaagagaagacctcatcaaggagagtgagaagatgtactcaagattaaactcataattaagccacacttgaagcaattggaactacgggtgctactcattcttaagcttcctctgacccttccgtctcatcttcatcgtcatcttcttcctccaccgcatcaacaccgtacctcgcattcaagaactccacagccgcaggagtcagaacaagcttatcagcgttcaaaatatcaaacagattcagtgtcctaggcgtcaacatcctcaaggttccaatgttcctactcgatttcgccacattctcatccacatcaatcatcaagaacatagctttctccttgggatccaatccccacctttgcatcgcagctaagaaatctttagtcttgggcttctcaaacttctccccaaantcctccaccactatcgcaccaccttccgcagatgccgcanncgataacgccgtagatatcgctagcttcttctccttcctattgattttaattgaccaatccttaggtcttg

SEQ ID NO: 268 - DNA, 699 bp, Arabidopsis thaliana
attatttccgattatgcccctctcgtcaccaaggccaagggccgtaaactcacggctgaggaactctggtcagagctcgatgcttccgccgccgacgacttctggggtttctattccacctccaaactccatcccaccaaccaagttaacgtgaaagaggaggcagtgaagaaggagcaggcaacagagccggggaaacggaggaagaggaagaatgtttatagagggatacgtaagcgtccatggggaaaatgggcggctgagattcgagatccacgaaaaggtgttagagtttggcttggtacgttcaacacggcggaggaagctgccatggcttatgatgttgcggccaagcagatccgtggtgataaagccaagctcaacttcccagatctgcaccatcctcctcctcctaattatactcctccgccgtcatcgccacgatcaaccgatcagcctccggcgaagaaggtctgcgttgtctctcagagtgagagcgagttaagtcagccgagtttcccggtggagtgtataggatttggaaatggggacgagtttcagaacctgagttacggatttgagccggattatgatctgaaacagcagatatcgagcttggaatcgttccttgagctggacggtaacacggcggagcaaccgagtcagcttgatgagtccgtttccgaggtggatatgtgg

SEQ ID NO: 269 - DNA, 699 bp, Arabidopsis thaliana
ctttttttttttttttttttctcacttgcaaattttcaatcataagaggaataataatccatcactacatatatagttgctaaatgacccaacctagaaccataatttattctcttaaagaaagaaaaaaaaagacagccgatggggaacatatgccgtacatactaactcataaagaaacaagcaagctcacgaaaacacggaatttctcgagttcagtcgtcgatcaagactctaattcttgctgttaaggtctttgaacacggggctgtccagtgcaacgcccattgcattcaaaccattgtccacatatatggttgcaccggttatggcagaggccaatggagatgccaagaaggctgctgcattcccaacttcatctgcggtcagtgttttctgaataggtccattattgtaggaatactcaatcatggtgtctatgaacccaatggcttttgctgctcggcttcccaaaggacccgcagagatggtgttgaccctaatgtttgatttccttccagcttcatatgcaagcacccgtgtgtcactctctagtgcagctttggcagaactcatacctccaccatacccaggaatgattctttcagaggcaatgtaagtaagagatattgaagcacctcctgggttcataattggcagaaaatgcctcagcaaggaaacaaaggagtaactcgaagc

SEQ ID NO: 270 - DNA, 699 bp, Arabidopsis thaliana
cttcacaatctcaaaagccatttttcaaatttcaaactcagagagagagagatgtgtccttctggtagaatcgcgattccgataaccaccaccgcgaatccaaatttccgaccagctttcgaaatcatcgacacagatcacgacggtaaaatcagcagcgacgatctccgtgcattctacgccggaatcccttccggtgaaaacaacgacgagacgatgatcggaacgatgatatcagtagcggacgcgaacaaagacggattcgttgagttcgatgaattcgagaaagttctagaaacgacgccgttttctagatctggtaacggaggagacaatggattgatgaaagatgtgtttaaggtgatggataaagacggagatgggagactgagttacggagatctgaagagttatatggattcggctggtttagctgtaaccgacgatgaaatcaaatctatgattcgattagccggtggtgatttaaacgacggcgtttcgttcgacggtctgcttaagatctttgggtgttgaaaaaaaaagttcgttttttttgacaccgcacattttccaactttattttgtttctcagttttgtttgtttgtttgcagaagtgtatttgtgtccacccagattttgttttatgttgttataaaaatgtgagaaaactaatgttggaacactaaaaaaaaaaaaaa

SEQ ID NO: 271 - DNA, 699 bp, Arabidopsis thaliana
ccacgcgtccgtgagagatggggcaatgatttagaacgttttgatacggtcgtagtctctgtgggacattggtttctgcatccagcggtttactacgagtctggttcggttttgggatgtcattcttgtgaaacaagtaactgtaccgaggtagggttttatgatgtatttagaaaagcgataagaacaacgttgagagcggttgctggaagtggtcgtgaggtgatcttgacgacattttcgccatcacattttgaaggacggccttgggacagtctcggcgcatgtaacatgaccaaaccgtacgaagggaaggttttagaaggtctggacttggacatgcgcaaaatagaaattgaggaatatacggcggctgcggctgaggtgaggttagaggtgttggacgtgacggctatgtcggtactgagaccagacggacatcctggtccgtacatgtacgcggacccgttcaagaacggtgtaccggagagaattcctaatgattgtttgcattggtgtctacctggtcctgtcgacacgtggaacgagatcatgatcgagatgttgcggcgatggaaggtttaaatgatgaacattgattgttgaagatcctatgatatcattcatttacacgcatatgacaaaagaacaaaatgtgtaataattttttgggatttcaaaaagtagctaggtagttta

SEQ ID NO: 272 - DNA, 698 bp, Arabidopsis thaliana
tgaatgaggagggcttacgagcttggaaagcaagtttccaacagagtaatagcatgtctgaccggaattatattacggatcattccactgtcagttatcttggtcctggtcttgatgagagtcagagccttactccatgctctgtggagaaccattatttttcagagaaaacatatgcaaaggacacattagatgagccgaagcggatagcaaagaagcttacttctcatgtatctggtacgggttgccataagaaagtttctgaaggaagcaatagaaaaagggataatgatttacatcggttgctgtttatgcctaatggacttccagacgggactgaattggcttactatgtgaaaacgcagaaactactacagggttacaagcaaggaagtggtatagtatgtagctgctgcagtagagagattagtccttcgcaatttgaagcgcatgctggaatggcggctagacgacaaccttatcgacatatcttcatctcttctggattgtcattgcatgatatagccatgtcactggccaatggacatgtcattacaactggtgatagtgatgacatgtgttctatttgtggggatggtggagatttgttactttgtgctggatgtcctcaagcatttcatacagcttgtttgaaatttcagtctatgcctgaaggtacctgcccggcggccgctcga

SEQ ID NO: 273 - DNA, 698 bp, Arabidopsis thaliana
ctttttttttttttttttttgtcggccaaatttcatattggatattaaaacccaataaagggtgttacagatgctgatgaaaagcccaatccctcaccatttacaactttgattaaaatttaaagcccagcttaacccacccaattctaaagataaggctaagacaaaaaaagtgccacgttgccaacacgtgtccaacgtgagatgaagagatgttgaaactgacgttgccggctgatccacgatccacctctgctccgtcggtcgggcttaatcaaatcaacaccaagagcttcttccacataattcgccggattccatcagctgaagattccatgccaccaccttgaaataaattcagagatctctcaatctagtcttcaaaggaaagcttcacctaatacctatcttgtaggtcccttcaatggacggtgaagatattactcccttataaaggaaaagatgagtttggtgaaagcagaattcttctgaagaagaaagcaaaccgaattgatcttgtaaacatgtggaaaaagaaaaactaaaacacaaacaaaaaatccgatctaatcggaaagataaaccggacaacgccggaagctttatccgttaaaacgaaaatttatttgtagatctgatttagatcagaaactataaacaaagtagaaagtttctctctctcaaagatacatgataga

SEQ ID NO: 274 - DNA, 698 bp, Arabidopsis thaliana
ttttttatagatattttttactcaaaagactttgacgaacttcaaatataagaacgagtattgatcctaggagtaatgatacagtgtgattaagagagattacagagcagtggcggggggaaataaccagcaaaatataagctttcttataactttgatgttgagatagatttcagcaaatgtaatgttatttggatgaaagagatcttttcagttttcaccctccaatttatcatgcgccgcttgcataaagacgggtccattccttagctgtatccacagcttctgcctcattactcttccagtgcttagcaatgttctcagaaagcggatcatctgggtttggtgcactcagaagagcttgaatactttataaggattgcacacgttaataaaataggagcagaagtcaagctccaagaaaccaatagtttttagcaggaaataatcttatgtaatcagctcatataccttaagagcactgttcgtatttgtagtgcagggctccatttgtccttgagaatatcaagacagattcttccaagcttgtcaatgttaggatggtatatctttgtgagaaacctaaccttgggagctgccatagggtattcttcaggcaaaaagagctccaacttgaaaactcctccttcataaggtgattgtgtaggaccaagaatcataacgttgaaataccgcat

SEQ ID NO: 275 - DNA, 697 bp, Arabidopsis thaliana
cggccgccgattttgttttattgcacggagataagtagttatagtacgaacagctcgcaaggaaaggggaaaagaatggtcctgaaagactataaaatgtctagcacgagaaaccaaaagtaactgagtcgagatgagataccgaaatgtttgatgagagatgcaaccatatctaaacatgagcttgatggaaggaggaaagcctgagaaacccgatcaaagaaatccactgagaggtagattgatggaacacacttccatggaaaaggattaaggggcagagcaaattattcaagtggacatgataaaagcttggaacaagttctctgcggtacgcttctgttcagatgtcccggaaatgagagcaacgcgaccgccatgggaatttttggaatcagaaatttctatcatggctcctgatatccttcttatgttgtccaagttgcctcctcctctgcccataactttacccactgcatttgctgggattcgaacctccatagtagtagactgaggcaatcctccatatagattggatgagtaagaggagttggatccataacttgtattgcccaccggaaaacttccataaccatagattccaccactcgaaggaagcatgctcatgctgctcccggtttctggtctcctattgaaatctacagaagcaacttgcggaacagaagacatgaaagat

SEQ ID NO: 276 - DNA, 697 bp, Arabidopsis thaliana
cgatgatgcctcgccgtgacgtcctcttcctctcactcctcctcgtcatcgccaccgtctccgctgtcgcattagccgacgatgaagcagattgtgtctacacattctaccttagaaccggatcaaccttcaaagccggtacagattcgatcataagcgctagagtctacgacaaatacggagactacatcgggatccgaaacctagaagcatggggtggtttaatgggaccaggttacaactactacgagaggggtaatctcgacattttcagtgggaaagcaccatgtcttccgagcccagtctgttcattaaatctgacctctgacggctccggtgaccaccacggttggtatgttaactacgtggaagtcacgacagccggagttcatgcaaagtgctcgtaccaaagctttgatgttgagcaatggcttgcgtccgatacatcgccgtatgagctcagtgctgttcggaataactgtccagtttcgcttagggaaagtgtcggtcgggtcgggtctgagatccggaagactctctcttggatcgtgtgagagtagtgaatgaaatgtcaaatgtgtatgtgtgtgtgtaacttggagagttgttctttgttgtcttgtgaacgtgtgatggcaataatgaaaatgattcgatcgaataaaagttccgttctttgttaaaaaaaaaaaaaaaa

SEQ ID NO: 277 - DNA, 697 bp, Arabidopsis thaliana
tcgagcggccgcccgggcaggtacacagatgatcaaatctgggaggctcttgacaagtgccaactaggagacgaggtgaggaaaaaagagcaaaagctcgattccagtgtgagcgagaatggagacaattggagtatgggtcagagacaactagtgtgtctcgggagagttcttctcaagagaagcaaaatcttggtgcttgatgaagccactgcttctgttgacactgcaactgacaatctgattcagaaaacgctaagagaacacttctcagactgtacagtgataaccattgcacacaggatatcttcagttattgacagcgacatggttctgcttctaagcaatgggatcattgaggagtatgatacgccagtgagattactggaggataagtcttcctctttttctaagcttgtggctgagtacacctcaagatctagttccagtttcgattgaagcaaagactctgctattttcctgctgatgatgacgatgaagaaaaacttaggatgtctgaatctggtttagccacaacactagctggattatgattcacacaagaagaaacactatcttttgttaaaagcttttgttcttagtttatagcttctactactgttgaacccctaaaaacgattattctacatcgctagtttcaaatcaatgcaataaaagattgttcaaaaaaaaaaaa

SEQ ID NO: 278 - DNA, 697 bp, Arabidopsis thaliana
tttttttttttttttttactataagatcatatttattgcatttattttattttaaaaaagccattacatgagaaagagtagcatttcataataatatttagaggtgacaatctctggttttatttatgaacaagaaagagattgtgagtttgtagtttttaagatatcattaatatataggtttgaggaatacgcatgcatgagaatatgagatcacctcacgctcaatccttttttcctttgcggtccttcttcttcttctcagaggaacccttcacccttgatgcggaagctaccttaccctttgcacgtgcagcagcagctttgcgagtcactgcagctgcagcatcgccttcagcggcagaagcacttgtagaagaaactcttgccttgcgacccttggcagtgacttgtccgctggtaaatgtgttggcactttcgaatgcattggcccctggacctttcggattgttaaaaccactagcatagctaacgacattgctatcgctgaaagttgtgccagttgcagaaagctgagctccaatgcctttggtagtagtttttggaagagaggtgccaaatttggtctccgtggacacatcttcgacctgccttgcggtgacaatggcacacaaaacgccaatcacgagaagcacaagaaactttgtggcattcatcttttgattttgtggattag

SEQ ID NO: 279 - DNA, 697 bp, Arabidopsis thaliana
cggccgcgtctgattggcgataaatcctctcttccttctcatctctcttttcctctctttctttctctcttcagccctaagagagaagaaataggctctgctctgcgccttttctacaagaaattcaccaaaaaagcttgaatatttatcggaatcaaagcttgggtttttaatcctggtaaagccatgtcacatatggtgtttcagagcgttgtcgctcccaaacccttatctcctctcaaaccctgtttacctatccctcgtccactcgttactctgccttgtaagctccgtcgtggcttcgttagagcttcttcgtcctcgtttcttgtcgatgattcagtttcaggactcgagcgttgcttacagttaccttctggagttgagttaggcacatcttcctctggctctttctctgcaagtactcagatgtgtcctgtgatgaaaggcaaatttggttcggtaggagctgttactttggaaaaagggaagcttgatatgacccagaagatttctgagactagccctgagattgcaactggaggagggggtggaaacattggaaagagtatcaataatggtggtggcgatggaggtgacgataatggtgatgatgatgattactttgatgaattcgatgatggtgatgagggagatgatgatggactttttaggcgtaggatgtttctcgcagaga

SEQ ID NO: 280 - DNA, 696 bp, Arabidopsis thaliana
ttttttttttttttttttttttttttttttttttacaaaattgcaaaagctctttctagaagaaaacataaacgttaacaagaccaaaatagacaaatcgaactatcaaaaatttataactgttttccttcttttgtagccttttaaccaaaatcactcgtacaatttcttggccgaaagagttctgagggttttggttttgtcctttgtagctttcgcttcatacttctcgctcaacgctatagctttagccacggctttcatcttccttgcattctttgttctcttcatgtttgtcgggttacgagaaagagtagctagtttcaggtatccggtttccgtagctactttcaagtctccggtttccgtagctagtttcacgtcaccggtttccgtagtgtccatggctacagccacagctttcatattcattgcaatcttcgttctcttcatcggttttcctttcctcgtgctcatcaagctacgagcacgagaagctagtttcccgtcaccggtctccgtagtgtccatcacttgaggagtagcttcagagacgctctgagattcagaaacgtccatggaagcttcctcgtctctattcttcttgttcctcttcttcgtcattgctgattaggtcagacgcacgacggcacgaagcaaagcaacgagagtagagagacggaaatcaatcgaatt

SEQ ID NO: 281 - DNA, 696 bp, Arabidopsis thaliana
  misc_feature (1)...(696): n = A,T,C or G
ccacgcgtccgagcgtggagttaactatgaggaagaagatgtttctattccccatatttatgtctctcctatgaatggggtcctcgctgtctcacactcgcctatcgatgttaacccggaagagtttgatagctatctgaactctcttgataacttgatgcagcaacctccagaagaggttgggcgagactcgtctgttcttgttagtgtaagctctccaatgagagaatacgaatgggctgaagcccgaatgaagatctcatctctcctggagaaggattttactactttgttcctctccaaggacgcagcagagatagcagcattagcaactaaactaaggaaagatccaaaccttactgctgaagagatagttaggttgaagctgatggaagagattccgaccttcagcgaagtgttccaagagaacaaaggggtgattgaagaagcagataggttcttctctgctctggaactcaacaaagccaaggtagcatcgcttaaatacgaatacagcgacctgaaggaaaaactaggaagtatccaaatggaagtagacacaaactctgagacaatccgtcaaatcgatgaccaaatcgctcaacttcaagccagacggnnngaattgaagcggtacatcngnancaaggagaaagagagggttgatctaagctatggtcaaaaaaatggtagcga

SEQ ID NO: 282 - DNA, 696 bp, Arabidopsis thaliana
aaaacctctgcatcaatggcgatttccaaactccatctactctgtcttctctcagtctttctctcccttcatcgtcttgttctttccggcaccgatggagaagaagaccttcttcttacagtattcaacaaatacagaacaggactaaacctaaaaaccttaacaaagaacgaaaacgcagaatgtctcgcagacgaagtcgtagaccaactaaagaaccaaccctgcacaaacactaataactcagctccagtccctggaaataacctcctcgctaaatgcagtctcaacacaaccgtagtcagagacggtgtgatcatgcaagtctgttttcctaagcatgataagaaccctgacttgagcaatttcaacagtgtcgtactcaagaacttgaatgattctaagatcactggaattggtattggttctggtgatatttgggttgttgtcatcctcactacaaacacaccggaaggcggctattctcttttaacaactactaactcaggagcttatgcattcggagttaatggccttgtttcttcaagtttcttgtttcttctcttttgtttcttcatgttttgagtcccttttttggtgtttttttatgtcacctcgttgtctttggttcttgaatatgttgtgattatggtgagcaaatcgcctttcttaaaaaaaaaaaaaaaaaaaaacaaa

SEQ ID NO: 283 - DNA, 696 bp, Arabidopsis thaliana
tcataagtgtattatattaaccaccaaaagaggaaacaaagcattaaagcttacaacgatatgtgcagaaagaaaagttaggcccaacatagcccataagattaacatctacggcataaagatgttttgacatttggactctatccaatacacgtgtccacgtgatattacaactgcaacacaagatgaagagtcatcggaagtgtaccgacatcaaccttcgccgccgatgaacaccgaatccggtgaggaatgcatcgccgaaacatcgcacaatgaatccttgtaaccaccgaaataaaactgaacggtgctccatttaaaagacacagcaaaaaggaatcataataagcatcggaatattcttcaatctttcaacccgaagacataatcgcttgatagatttctgcaaatcgaagtttctaaagacacaagacagaaattaatcttaagtaactagcacctaaaactaattaccatctcaaatctgttgagatttattgaaaaacaaaactaaaatatcaaagcaatcagcataaaactgattgactacgagcaaggatacaagcggccaaaacctcttatgaaagcaggatttgccgtacgggaaccggtcatctccactaaaagagctagaagataccgggcaaaagcccaaattatttggaacggctatcatcggaaaattcttgtagg

SEQ ID NO: 284 - DNA, 696 bp, Arabidopsis thaliana
  misc_feature (1)...(696): n = A,T,C or G
gttgtaatcattatcatcagaaataatcgtaagaagttggaaaaatgtccaaaaaaaaaaaggaaaagtacaggttgacctagaactaaccctgttcttgttcttaagccctctttttggcattgtttttcttaaaacatatcacattttgaagaaaannngaatgttgatcacaaataaaagatgaagcgaagattttttgtcttttggctttctatgaaacctgagaagagttatatagagttgttgtctatttctcgtgaacgagagggctgtaaacagggaaccacatgttgcgtgtaatgtaattcactgtatcctccttagacatgtggctgagatctttgggaccaacatcaccatgtccttctgcaatgtcatcagtcaccgcagctcgtagaacagctgccccgacttcagctgttatgtgtcggatgttgttgattgaagggtaaaggatgcctttttggacttcttcatcggtcatgtaggacgcaaggcattcagaagctgcttgtagcattccatcagttacgatacgtgcaccagagagaagagtccctagcccgatccaagttcaacgttctcaaatggacttccacttgcaaagacaatgtttcctccggcgtgtttgaaagcatcagcagcagtgcactcggcattcaaagtgggattcgacatggcaaaaatggcagg

SEQ ID NO: 285 - DNA, 695 bp, Arabidopsis thaliana
  misc_feature (1)...(695): n = A,T,C or G
tagaagaagatctcattactgttatatttcaagaatcaggttctgaacctgtcaataacatgaacaatgagtcatttagacaaaaggtaaanacacataacantcctgtctttttnaccagcaaaaaccagccatgaatgnnnntttagaacaaagcgaaggaacattctttatgaaattacataagaaggtagtcaaaaaaaaaaaaggagaaagccgaagaagttgtttcaatcctcacttagccatcataaccttcacaaactcttcgtagttgatctgaccatcaccatcaacatcagcttccttaatcatctcatcaacttcttcatcagtaagcttctcgccgaggttagtcatcacatgtctcaattcagcagctgagatgaaaccgttctggtctttgtcgaaaactctgaaagcttccttgagttcttcctcagagtcagtgtccttcattttcctagccattaggttcaagaactccgggaaatcaatggttccgttaccatccgcatcaacttcgttgatcatgtcctgaagctcagcttcggttgggttttgaccgagggaacgcatcacggtaccaagctcctttgtggtaatgcaaccatcaccatccttgtcgaataagctgaaggcttccttgaattctgagatctgatcgtctgtgagctgatccgccattgtttttt

SEQ ID NO: 286 - DNA, 695 bp, Arabidopsis thaliana
cttttttttttttttttttttttttttttttgagaaaaaccaagtgttaagtggaattgtagaaagttttattacataagacacataggagtcaaaatgtacaaacaagtgttaattgtctgggtcatcttactccctttttattcaactctactaaacacacaacaaataataaaactcaatttaaacttaacacaaaacacacactaaacaaagccaaattcaaatccagatatcggaagtgcagtctccacctggatatctcatctcgtgggctagtgaaggaccgtctggttcatcaccaaagtccacaaagaaatcagggtttatggtgagaccacctttttctgtatcaacatcaatctgaattatgtgtgagcctttctccatgatttcaggataaaactgacgatcccatgcgctaaacagcgagtttgttgcatacaatcttttcccatcgaggctcagctgaatcatttgaggtccacctcgtagagagttccccttgatctgaggaacctcgaattggaaagtgttgccgtcttctccaaccgccttaacaggactgcccttttgtagtaatcctccaacccaaatttgtcctgttaagacaggggttttagggtcctctatgttgtactgacgaatgtctccatggagccagttcacaaagtaaatgaatcggtcatcgaggg

SEQ ID NO: 287 - DNA, 694 bp, Arabidopsis thaliana
  misc_feature (1)...(694): n = A,T,C or G
gaacaacttaattagctctctcgaactcacatctcttacacttgaagacccatggcctgctttctagcctaaatttcctcgagaaaacaagcaaaaaaacacaagaaagctagaatcttattttcttcttggtctttcttggtttcttcaactttttcttaaaaacgttttcaaaaaatcatgggcaccggagaaaaaaccctgaagagcttccagttacatcgcaaacaatcagtcaaagtcaaagatgttccaaaagggtgtttagcgatcaaagtgggatcgcagggagaagagcaacagagatttatcgttcctgttttgtattttaaccatccattgttcatgcagctcctgaaagaagcagaagacgagtatggattcgatcaaaagggcaccatcacaattccttgtcacgtggaggagtttcgttacgttcaagctttgatagatggagagagatcagtttacaatggtaacaaccatcannntagacatggtggccgtgaccagtatcatcatcttgttggatgcttcagagcttgatgaataatgatgaaatgaaatgatgggtggtgattgtatgtgttcaaattttaatgttttttctggtttaatcttgtggagttgtggagccaaaactggcctaacccacaaaagaagtgaatcttctaaattctatcgatttgtagta

SEQ ID NO: 288 - DNA, 694 bp, Arabidopsis thaliana
ttttttttcgcacgttgtaaataatttttataaccgacagagaaacgcgtgtggctcataacatatggtttatactatgtaacaacgataatgaattacaaatgtcacaaactctcaagacacaaacacaaaccaggtgacctcatctaaaacttggttcaatatcaacaaatctactaagaaagataaaccagagcgtctaagcagaaagaatctttctgaaatggttttagcttacaatgctctaactctatgtaactccttcatgactttctcttctcttcatcttcttcttcttcttcttcttctttctcaatctcagacatgtttgcgcttgcctctttatcatcaacctcttctttctcttcttctgcttcatcctccatatgatcaatctcttcttcttcttcttcttcatcatcctccatatcatctgtttctctccatttcggctcttcctctgactctgagtcctctccttcactctcaccctctgaatttggatattgtttctcttcttccttagtttcagcctctacacctttgtcctgagattgttctttcttatcgctacaatcatcttcgtattcctgctcttcgcttctgtcatcagattcagcttctagactcacttcctgctcttctgctgtcctgtcagtttcagcattcaactcttttaacgatcttagattct

SEQ ID NO: 289 - DNA, 694 bp, Arabidopsis thaliana
tcttaggtaagcttcaggctggaaatggagaagaaggtggattaatgggaatgcttggcaaattggcttcagggtttcttgagggtaaactaaacgatgaagactatgtgaaacccgctatgcagacacacgttgggagtaaagaagaggtttatgctggtggatcaagaggttcggttccgcttccagacagcgggatactgatcagcggttgccaaaccgatcagacctctgctgatgcgactccagcggggaaaccaactgaggcttatggagcgatgagcaattcgatacagacgatattggaggagacagacggtgagatatcaaacagagaaatggttacaagggctaggaaggcattgaagaagcaagggtttactcagcagccaggtttgtattgccatgatggttatgccaacgctcctttcatctgttgaaaacagaggttttattgaatgttttttactacgtacgacacgttgattgaagtttctggtcggaaaaataagcctgttttttttttttgctgtttgatggcatttatgtaatttacaagttatgtgtgttgtgttctgtgaaacactaaaattcttcttgttttattgagatctattatgttggttgtgaaattattttttgtttttcttttcttgttaactctctgtattctgcacatcaataagaaaaagtt

SEQ ID NO: 290 - DNA, 694 bp, Arabidopsis thaliana
taatttacccaaacagttcagattcataagaatatcagatacaaaattcattctataactactacagcatagcgtgctcaaaaaatggatgccaagaaaagttgaataagaaataaaacaaaaattcaaacagacatttgactcatgagaccaaactcttttttagctgccaacacatgtgtgtgataatatctatctacaaagaccaaaaaacagtagtacaatcatccaatcactgtcttaaactagaaaaaataagagtaacgtagtcccagaaaacgggacacaatgcgcttccagggttttttcttcaggttctaatacctataagctgaacctgtaggcggtggtgctggtggcaaccgattgggggtggtgcggcggttgctaccagaccctggtgatgctgcatctccgttctgcgcagggtcactgtaacggcggctgtgaccaccggaaccgtactttgacaatgagtctgagggtccattagcagcggagttgaaggcattcatccagtcgtcccctgaagaacctccacttgctcttgggctactctcagtgccactgttgtccgaataacttgaagcagctgctgctcggttgtcgtgaatgctaagctgcctcgtgagtttagaaagaagagaggattgtttctggtaacgctctcttcgtcttttgacattctgatcct

SEQ ID NO: 291 - DNA, 693 bp, Arabidopsis thaliana
  misc_feature (1)...(693): n = A,T,C or G
tggaaacaactcattacaaatgaaatcaaatctttcccccgcaacaacattcattcaatcattcactcaaaaacactcaggtaagagatattcaagactctgaaacgccattctcttccttggcctccacggcgacgtcttcggtaggttccggtggannngnnntgcctgnggctgtgcgacggtgattggcggcttggaggacgtgagcgtagtttcctttctccatgaagagttggttaaagtgatgtcggcaatagagaacgctatctaaggaggcgtaggaggagtgagtcagcgtacacccaccgtgagcgcaccggaaacatgtcttgtggaagcattctccttccatttgtatcttttcaagagggtaaacagttttttcgcaagcggcacacttgtcttgtgttccacagaagatggaagatatcttgctgggagtcctagtcagctctggcttctcagtttttcctggttgaaagtttttgctgaaattgccagattccttgaagagttgctcaaaatgagtcttgcagtacaaaactccatccatggaggaatagttgctcatctgaagggttcctttgcaatgggtacacctgaagcaagacttgtggtaaggcattccttcaatggacaacatgtccaccacatagactgtcttatcacaaacattgcatttgtcgagag

SEQ ID NO: 292 - DNA, 692 bp, Arabidopsis thaliana
aaatcttattgtagaaattactctcaagagtttttattggctttggtaaatatagaatgacatcgataaaaagacaaacattatatgtaagagttttttttagttggcttgagaaggcacatcttgtaacccacagaccatatttgctggtactgcaacatcaatcatcttcggatacgacagattcagatttgacataatggttttgaatgtttctttatctttagttagacgcgggttgtgttgcatctcttctccaactgtacttacctcgaaacctttgtagtcgtgagctggatagatcaatgtgtcctttggcaatgaaaatatctgtgaatgtacagactcgtagagttgatctgagcttcctccctgaaagtcagtcctcccacaaccacggatgagtacagcatccccggtaaaagccattcttggttggggctgatcagctccttcaccagtcacatatgtaacacatcctgcagtgtgtccaggtgtagcacgaacctgagacaaatgtacactcttcactttctagcctctcatttattgtaccggtttgaaattgtggtttcatacctcaaggtatatatcaccaatagatactttgtcaccaggttcaagaaacaaatcagctttggaaccacttgctttcgaaataacggatttcacacccgggagcttcgtcttaa

SEQ ID NO: 293 - DNA, 692 bp, Arabidopsis thaliana
ccacgcgtccggactcggacttgcaattggtgccattttaatggatttaaagaaggctacgactttggcttcagtaactgtcatgacattcatgctcgccggaggattcttcgtcaaggcaagtcctctgtttcttgatttcctctgtttttaacttcccctgtttcttgatttcccctgttttactgatttccttttctgtgtctacacagaaagtgccggttttcatatcgtggatacgttatctatctttcaattaccacacctacaagcttcttcttaaagtacaatatcaggacttcgctgtgtccatcaacgggatgagaatagacaacggactaactgaagtagccgcactcgttgtcatgatattcggttatcgcctcctcgcgtatctgtctctaaggcaaatgaagatcgtaacataacccattttccacacgaagaaatcaaataacatagaagaagcataaaaagagtgcatcagatcttgatgatcttgacacgaccaatccttgacaatgattaagagattggtcctaagattattcttgcttaattacaaaggtgttgtgagtttgataatgattggatggtgatagatgtcttgattggagataaatatatatgttcaagtttgtaattgtagttcgaatctaaaattggttaaagtttattaacaagaagaacct

SEQ ID NO: 294 - DNA, 692 bp, Arabidopsis thaliana
ttttttttttttttttttttttttttttttttttttttttaagaatccaaaacttgagagtcattctaagtgaaacatcatagcagctaagttcccaaacaaaaacaaaatatggtaaaacgagaaagataacaacagaagcatttcaaattcccataagaagaaaaaaaaactccattgttccttaattctcaggaatctcaatctcaccttcttgaatctcctgctgaagatccttagggtctttcccatcaacagtgcatcccacagagacacacgttccaagaatctccctcacagtcccactcagctccttagcaatagatctaggcctcataatcctagcaatctcagtcacatcatcgaaagagatgttaccgttatgcttaatgttcttcaccttcttacggtctctctctggctccttcaacgccttgatgacgagagctgcagcagatggaaccacggttaccttagcttgacgattctgaaccgtcagcttcacggtgacacgaagtcctttccattctttggccgtctctttcgcgatgtcttctccgatcttctttggtgcgagaccgagaggaccgatctttggagctagagaactggcggctcccacttctcctccggttacacggacgtacacatcgacgatctggctcgggtccaacttcggcggcatggctctg

SEQ ID NO: 295 - DNA, 692 bp, Arabidopsis thaliana
tccgtccaagcatctgcaggagtgaatcgcaaaaccaaatttggaggattctttctgaggggtttctcagtgagaaaatggcttcgaaacggatcttgaaggagctgaaggatctccagaaagaccctccaacctcctgcagtgcaggtccagttgctgaagacatgtttcattggcaagctacaattatgggtcctgcagagagtccgtattcaggcggtgtgtttctcgttaccattcacttccctccggactatcctttcaagccaccaaaggttgcatttaggacgaaggtgtttcaccctaatatcaacagcaacggaagcatttgccttgacattttgaaagaacaatggagccctgccctcaccatttcgaaggtgttgctttcgatatgttcgctgttaacggatccaaatccagatgacccgttagtgccagagattgcacacatgtacaaaaccgacagagccaagtacgaggctactgctagaaactggactcagaagtatgccatgggctaaacaaagattcgtatgcttcagcacctgtttatgctcttatatctgtttatttcttcttcttgttttaactctaataaaaatgtctaaaaatatcaacttttttcgtctgtactatatgtttatggttttattatcatcatctttatctgaaatttgaagatggaattc

SEQ ID NO: 296 - DNA, 692 bp, Arabidopsis thaliana
ttttttttttgagttatttcgttaaatgtagacaaatttgtgacaagaaaaatgggtaatttattcaagatccaaacacaccctcccaaacgatttcccacaccgaaatcgtttagtacatacaatttttcttctgcttttcaatgcttcgaatttctaaaacaaaatcagtttttaaaatccgattacaacaaaaaaaaaaatccttattccggagactcgaattcttcagatagcataaactcacacccaaaggtttatagacaccttttgttcacgtcccattttcttagtacagcagctcttcgaacacgggatctacgctttgtccccattctccattgtacatctccaagagcttctccgcaggcgtaactcctgttctgaccacttcatcgactgcgttcaagaaaccggcttccttgtagcctctgcgctctaaaccatcctttgcgagtttcaggacatcttcagcgacatgctttaacaaaccatccctaaaaggagtctttaagccagtaactgggactttgttccttagcatctctctctctgctggagtccagtcagctgtcagatccaggatagcttggagactatcatcatcatataataaacccacccagaaagctggcagggcacacagcctcctccagggacctccatcagcacctctcatctccaagtatctc

SEQ ID NO: 297 - DNA, 692 bp, Arabidopsis thaliana
  misc_feature (1)...(692): n = A,T,C or G
tgaattcagaatttaacaacaacatgtaaattaagatttaaagaacctgtgtatgaatagatattaatgtgaaagcctcgagtgggtcatgaaaatgaaatgtcacggtggatggtgccctagccgaagttcaagatcaagctcatccactgatgttcctgtcgcttctttcatcgagccaatgctctcatcatctcctgtcgaatattcaataagccgaggaggaacttctactggagaattcaacattgaaaacggaaggttgctcggaggaaacgaagtcgtaccataaagattcaccatgtcaccagaattaccaaaaatgccactagggttttgcagttggtagaaatgggacaaaccttcaatgttactcgccgtggattgtattataagtgtcgttgtaggcaacggcggagcacaagaattgagtaacatcnncccgtggccgcttctagccgcagccgcaacggtggaaccttgatgagccctagatgaggcgcggtcacggcggtggacattcatgtgaccgcctaaggcttgagcagaacggaactcacggcggcagaaattgcaagtgtaagatcttggaggccaagtggtaccagagatgttgcctttagtgtcttgctcaaaggctttgacttcccaagattcatcatcatcctccaattcttcaattgcggccgcga

SEQ ID NO: 298 - DNA, 691 bp, Arabidopsis thaliana
ccacgcgtccgctcgatttattctgcaattcattggtaaaagatgttggcaacgagcttaatcttccttcttacatataccttacgtgtaacgctagatacttggggatgatgaaatatattccggatcggcatcggaaaatcgcatctgagttcgatttgagctccggcgatgaagaattgccggttccgggattcataaacgctattccgacgaaatttatgccgcctggattgttcaataaggaagcttacgaggcttacgtagagctagcgccgagattcgcagatgcgaagggtattttggttaattccttcacggagcttgagccgcacccgtttgactatttctctcacctggagaaattccctccggtttacccggtcggaccgattctcagcttgaaagatcgagcgagtccgaacgaagaagcagtcgatcgggatcagatcgttgggtggctcgatgatcagccggagtcatcggtggtgttcctctgtttcgggagcagaggaagcgttgatgagccgcaagtgaaggagatagctcgagctttggaactcgtcggctgcagatttctttggtcaattagaacaagcggcgacgtcgagacgaatcctaacgatgtgttgccggaggggttcatgggccgagtagcaggccgaggtttggtatgtggttgggctccaca

SEQ ID NO: 299 - DNA, 691 bp, Arabidopsis thaliana
cccaatttacgttcctaatgggtccggtttacactgccttaaaaaacgagtttattacgcaaaccaaatcggttctcaggcttgtagacgacccggatttcgtgttccaagggacaatggacctttgttacaaggttgggtcaacgacacggcccaatttctcgggtttacccatggttagtttaatgttccgtggcgcggagatgagtgtgtcgggtcagaaactgttgtaccgggtaaacggagccgggtcggaaggaaaagaagaagtatattgcttcacgtttgggaactctgatcttttggggatagaagcatttgttataggtcaccatcatcagcaaaacgtgtggatggagtttgatttagctaaatcaagggttggtttcgctggtaacgtcagatgtgatttagctagtcaacggctcggattaagagattgataggacttgtttaagtcttctgtgtcgtgtgtgacatgagaatatcttctagaccattgatacgtttttatagttttgtgagtatagcttacagtcttcttatacgattatggtacgtagagttttttttttttgtggggaattttgtaaggatgtgtattataggaaatcttcacttttttcgtttaaaaattataaaattagaaagcgatttagatattttggtataggttcccttcctcagtctg

SEQ ID NO: 300 - DNA, 691 bp, Arabidopsis thaliana
cccaaaatgctccaagaaccgtcggctgcattctccctccggcgtaactcattcagacgccgatctcccagatcaaatgtcgatgacagaggctggaatccgctccatatcaaagccagaaaaggcgatctgaaatctgtcaagcagcttctcgaccaaggaatggatgtgaatgctctagcatggggacccaaatcaaaaggagtgagtgcacttcaccttgcagcagagggaggtcacattgaagtcatggatttactcctagaacgtggggccaacattgatgctaaaacatggggctcatgcgggtggactcctctccacgctgcagccaaagagcggaagagagaagcagtgaagtttctggtggagaacggcgcattcttggcagatgatataactgataccaggtttaatccgccggtgcattactgtcacggccttgaatgggcgtacgaggaaatgaagaagcttaacagcgagtcttcttcttcatctggtggagacacatcttccagttctgacaactgaacttcttcttggttgtttctcggtgtgttttgttttgttttctagttgagactacttatcagaactattatggttggtgtttgatcttatgggctatgtgaaacattgaaactgcggatacattcatgtaatcttcagtgtgttattttgcaaaaaaaaa

SEQ ID NO: 301 - DNA, 690 bp, Arabidopsis thaliana
  misc_feature (1)...(690): n = A,T,C or G
gtggtcgtgataatagtgaaaacaaagagtggttggaatgaccagaacgttgaagcagttgcaatgttgaaaagatatagttatnaaagagtcaagaagatgacaaactcatttgagcatgttctcgggaaaggaggatttggaactgtctacaaaggaaagttacccgatagtggtcgggatgttgcggtgaagatcttgaagaagtcagaggggaatggagaagagttcatcaatgaagtagctagcatgagtagaacatctcatgtcaatattgtttctctgcttggattctgttatgaaaagaacaagagagctataatctacgagttcatgccgaatggatcgctcgacaaatatatatctgagaatatgtcaaccaagatggattgggaaagattatatgatcttgcgctaggcatctcccgcggcctagagtatttgcacaaccgttgtgtcacgaggattgtgcatttcgacataaagccacagaacatattgatggacgatcgtctttgccctaaaatttcagattttggtcttgctaaactatgcaagaataaggaagaaagcataacttcaatgctagatgcgagagggacagcaggatacattgcacctgaagtattttctaagaacttagggcgagcttcgcataagtcagatgtgtatagttacgggatggtggtt

SEQ ID NO: 302 - DNA, 690 bp, Arabidopsis thaliana
  misc_feature (1)...(690): n = A,T,C or G
ttttttgctatgaataaatgaatttatattaaaatcatcagtgagacaccatttatcacacacgtataacccaacaaacaaactcaannngngagagaaaaaggaagcttcggtgtgtgtatacctcaacaaactcaacaagcctttgatatctgtaaaccatcttcacaaaaactatggaccgacgaaatcagaacaaacaaaaatatgaaacgggttcactttactgggactaaccaaacttacatatgttacagacgaacaaacatgtccacaatctgattttaagatttccacggcttgctacacctttgacttccccgagtattcaaacatgagattttccttgccgtgagtttccgccattctgtatcagtgaggtttgattcttttctctcattcccacccgagcttcagcatctgatccaccacctttaagcttaaagccggatcagtgaagattatcaattgtttatcttctgtggaaactaagaggttcgtgttgtcaacgttcagagccagtgcggttatatcctggccttgaccaagctttagcacatggaatacctgtagtgtgtataagttgaggaagcaaattgaaggagatggaacatccagtctttcaatttctttgctatctttcgatgtatcattactactcgaataatccgagttggaacatgagttcat

SEQ ID NO: 303 - DNA, 690 bp, Arabidopsis thaliana
tttttttttttttttttgtttgatttctaggattcatatattcccaacatgtcaaaaacataagaaagtgtgaaaattatttgagtaatttatggtccaagtcatcactcatacacaattacacgtatcccacatcgaacacttggaacttttcttgacgtagaagaatttggggatcaagtgagagattctttgatgtatgttgaatgtcgatctacgaggagacgaatgagattatcttctacgatagattccggcttattgctatcacgtctcaccacaacattaccgctacttgaaacaaccacaacttcctccttacgcgttaatagttcatttgctacaactgcgtgcactttgtatttttgtaaagcctttgtagctttctctagcaaaatctttgagtctgtctcaagcttgaatgatatgcagaaagcctttggagcccaatttgatctcaagattgaaagcattttagggacttgagctagtcttatgtccaaaggaccagatcctgattctattttgtgctctgtcatgcttaaccatggcacatagaagtcagatacagcagcagcaagataaaaaatcgaacatggaccgacatctttcaatatcgtagcaatcaaccgcaacatctggagatattcatatatggttgagaatgggagtttaagcaagcgaccttct

SEQ ID NO: 304 - DNA, 690 bp, Arabidopsis thaliana
aggcaaaactaatatacacaaactaactcgagactacgcttcaagcggctattgcgtcacgtacatattcaacaattacgttgtcgtttactcgtgcagtaaatgtttgtttctcgtcataatagctccactcacctgccggacatgtaccattctgccatacaccactcaacacactgccttcttctgcatatatataactaccattcccatgccgtacatcatgctgccatgcacctatatacttatcaccattcgcatacgtgtatgtgccattgccatgacgcaagccatgctcccatgcacctacatacacactcttatcagggtacaccatagtaccatgaccatgtcgttgtccattcacatacacaccagtgtactgcactgctttgttactgctatcattgtcgtcatcgttattatcatcatcatctgctgctacactgctgttctgtaacttccatgtgtatgtacctttaccatgtttttgttgtgttacattgtattcacctgtatatgtgtcgccatttgggtattgtgctgttgctgtaccactagcaccagccggcaagtatttcaatcgttttgtcttactgccaacaaatttgatgctgtatggcagtggtgcattgctctcactatcactcatgcttgtaacgctgagtggaaaaccaaaacaaaatcgta

SEQ ID NO: 305 - DNA, 689 bp, Arabidopsis thaliana
  misc_feature (1)...(689): n = A,T,C or G
tggcccttcaagctgcttctttggtctcctctgctttctctgtccgcaaagatggaaaattaaatgcttcagcatcatcatcattcaaagagtctagtctgttcggtgtttcactttcggagcaaagcaaagctgactttgtctcttcctcattgagatgcaagagggaacagagcttgaggaataataaagcgattattcgagctcaagcaatcgcgacttcaactccatcagtcacaaaatcttnnnnagaccgcaagaaaacacttagaaaaggaaacgtggttgtcacgggagcttcttcagggctaggtttagcaacggcaaaggcattagccgagacaggtaaatggcacgtgataatggcgtgcagagacttcctcaaggctgagagagccgctcaatctgcagggatgcctaaggacagctacactgtgatgcatttggacttggcgtctttggacagcgtgaggcagtttgttgataacttcaggcgagctgagatgcctctcgatgtgttggtctgcaatgccgcagtctatcagccaacggctaatcaacctactttcactgctgaagggtttgagcttagcgttgggataaaccatttgggccactttcttctttcaagattgttgattgatgacttgaagaactccgattatccatcaaaacgtctcatcattgtt

SEQ ID NO: 306 - DNA, 689 bp, Arabidopsis thaliana
ttttttttttaaccaaaaatctcagctttttagtattaaaaaagaaagaacaatgttgatctacacgaccactgatcatggtcttctactcttcttttacattcttaaaagtgttgtctagagaaaagaatcaaaagaggagagactagcttctgatgctgactccattgttgttgatattctaaagcttggaattgccactgcgaggcgggtctttggcccagagaggagggatgattctatggtcttgcacaggaggctgctcttcctttttctcggtttctttttcgtcccctgtaactgatttagagaatgcatccggattggcattgatacagctttgcaatgctacaaatggattcacgcagtctgatcccttttcttcagcagtgcttttgagaaagcaaaggaatgcctcggagaactgagacccgcaagagccattacgcaaatctgctatacaaggacaatcgagagctctctgtgctttggcttcaagagactcattctcattatcatcttcaccatatgctgcagcttctgcaagaagagaatccatcgatggcgacgaagtatcttcagaatcccgaggtgaattcgcagaaggaggaggagtgttcgttgtcgtcgtcgtcggaattgagttctcgtcactttgagcttgacccatctcgagaaatttctgtcaa

SEQ ID NO: 307 - DNA, 689 bp, Arabidopsis thaliana
cattgctgttcagattgggttatgtgtgggattgacgtttacatttccgatcatggtacatccgcttaacgagatcatagagcagaaactgaagaggatagactggcttcaaaagcatcataatgggtacagcaacgaaacaggttcagtctcaaaatttgcaatctttacaacgaggacacttttggtggtaggacttgcagcaatcgcgagtttagtcccagggtttggtacatttgcatctcttgttggaagtactttgtgcgcactcatctcctttgtgttgccggcttcttatcacctcacgctgctcggtccatcactaaatgtatggaacaaatccatcgacgtattcattgtgatttgcgggttgatctttgctgtttatggtacgtacaacacaatcgtcggagtgtgaaaagggatagcatgtgatctgtgtaaagcaacgaatataactacaagaagtttggtaagacagacaagaaaaaatgtatagatcttttacatgaatctgaaatagaaagatggtgagaaagttgagattgttgtatgatcatttaatggtgtcaggatgcagagtcttaaacaattaacacaccgattttcttttttagtcttcctaattcaattttccagattttgtttttatttttctttaatttttaaacttaagtatgaaattggta

SEQ ID NO: 308 - DNA, 689 bp, Arabidopsis thaliana
  misc_feature (1)...(689): n = A,T,C or G
ccacgcgtccgctacttcagtcttcaagcttcacttctcagaagaaagtaagatctgcgaatctctctcactctcacaaatggcaacgcttttaggtttctctcagactaagtttcaccattgcggcgtctggatttctacgccgccgtgctcatcttcttccacggtagtctcaatggtgggcttgaatcggactgattcgaaaaagctccgttcagatttcctcggccagattggttacgaagatcggagacaagtaagacacagttactgtagaagctcattagctgtgaaaatgtcgtgggacggtcctcttgcttccgtcaagttgatcatccaaggaaaaaacctcgagttatcagagccaattaagcagcatgttgaagagaaagtaggcaaatctgttcagaaacacagtcatcttgtgagagaagttgatgtaagactctctgttcgtggtggagagtttggtaaaggccctaggattcgaagatgtgaggtgacattgtttacaaagaagcatggtgttgtgcgtgctgaggaagatgctgagacagtatacgcttgtatcgacttggtatcaacgataatacagaggaagctgaggaagannnnnnnnnnnggactcagaccatggaaggcacatgaaaggtttcaacagattgaaggtaagggaaccagtgattgag

SEQ ID NO: 309 - DNA, 688 bp, Arabidopsis thaliana
ctttttttttttttttttttttttgattaaatacctcttaagtaaaagatgttacaaatgttctatagacacaacaagacaaactcaaaaccattacctgatgactccaaaattaaacgagaaaccaaaaaagaaaaagaaaaaaaagttctcgatgcgtgacttacctctctgttgtgttttgtaaactgaatggttcctattgagaagtaatttaggtacaacaaaaagctgttcttgaattggaaacatattaattcccaaaccccacagcacattaccaaatatggaatgatgatgatgatgatgtgagtcgatgaatggattggtttggtcggagaatggttcgtctagccgaggagatctttgaacagtgtagggttctgacttgttggattcacacccatttgtctaacaagagcgtctttctcaagagcttcctttgtgtttggtcctttggaggtttgaggttggtacgtgcgtgagtttcctttggagctatcagacagttcggataagagagagtcaacacttgtggttgttgtcacaggtgctgcatctgagtatagtcccatcacatcggatgaaccaccgtcttggctcgaagaatccataagaccttccaattctttaaaaggatccattgctgtaacggttgtggcagttggctcaccgaagtcgagcaagt

SEQ ID NO: 310 - DNA, 688 bp, Arabidopsis thaliana
gtaccaccaccactccaaacaaacagatacacaagtgggtatggcaagtgagagcaaagccgaccaacctttaagagagtcaatagtaattgggacccatgtatcactatgcacgctagtgaaatacacaaaagaggataagaggactacaaggttgagatttgtcaaaaccatagctatagcgactcccgctactcccatctcaagtttcaccactaggaggtagttcaaaggaacgtggaggagaacggacacggccgtggagtaagtcacgggcaatgtaatgttttgtgttcggaggtaaattcgaagagggtgaagcagagagagaaggaagaggtcagggatggcgaatagaaggaactgttgagcaacagaggagatctcttcatcttggccgcaccataagaggattcggcgcatgttgagccacgagaaggagatagggaccgagcaggagaggagtaggaggacggttctttgaagggttagtcctaaaagcttcatttgtttagctccgtatgcttggccacagattggttccatccccatggacaaaccggagatgacggagtagccggtgatattggcaaagcctatggagagagatcctccggctaactcaagctcaccgaggtagcctaagaacagcatcgatatcatcgctcttgagtacctgcccgggcgg

SEQ ID NO: 311 - DNA, 688 bp, Arabidopsis thaliana
aattcaagatgtgatacagacagatgcagccattaaccctggtaacagcggaggacctcttctagatagctcaggaacgttaattggtataaacacagccatttattctccttctggtgcatcttctggagtgggcttttcgatcccagttgatacagttggtggtatcgttgatcagctggtgagatttggtaaagtcaccagaccaatcttaggtatcaaattcgcaccggaccaatctgttgagcaattgggagtgagcggtgtgctcgtcttggatgctcctccaagtggtccagccggcaaagccggacttcagtcaacgaaacgtgatggttacgggagactaatactaggagacataatcacgtcggtgaacggtacaaaagtctctaacgggagtgatctgtaccggattctcgatcaatgcaaagtcggtgatgaggtgaccgtagaggttctaagaggcgatcacaaggagaaaatctctgtaactctcgaacctaagccggacgagtcttagaaacgtcgttgaaagaagtaaatatataacgtgtagtaaaaaagaaagtccggtgggttatttctgtatatcaattgttcggaaaatagatcgtccaattgtgtacataaaaaatcagtttacaattgcatacatgcaaagggtaaccggaaataaccaaaaaaa

SEQ ID NO: 312 - DNA, 687 bp, Arabidopsis thaliana
  misc_feature (1)...(687): n = A,T,C or G
agccagcaaaagaagaacgaccatgcagtggtgttgtgtgagtatagtatggctcagtttagtactggtgatcgtagaagacagaaattcgacaggcgatcaacagagctatctcttgtcatccgtcagacaatggaagcttgcatattaaccgaattgatgcctcactctcagatcgatattttccttcaggttctacaagctgatggaggaacaagatcagcttgtatcaatgccgcgactctagctctagcagatgctggaattccaatgcgtgatctcgctgtttcctgtagtgctggatatttaaacagtactcctcttcttgatctgaactatgttgaagacagtgctggaggagctgatgtaaccgtcggtattctacctaaattagacaaagtgtcactccttcagatggatgccaagttaccgatggaaacatttgagacagtgtttgcattggcttctgaaggttgcaaggcaattgcagagagaatacgcgaggtacttcaagaaaacaccaaacagctagagtatcgccgagctgcataaactttagagttagagaaaaaaacgtaaagctnnaagatttttgttaattagattttgctgttgtttgtggaagttgaggataaaaagctagtagtgcaaactctttttgggaaaaatgaatcaatttggtaaaaa

SEQ ID NO: 313 - DNA, 687 bp, Arabidopsis thaliana
gcggccgcaaatagtacaaagccaaccaaatcaaaagatagaagcagtcacaaagtgaagccatgcccatatgagtagtgtgtgacataaggtctattcactttttgatatggtgacattgtagtgagattcagacaattttctatccttaaatctctaaaggtcccaaggattttcttttaaatgcaatcttccattgttcttttgtacagcacaatgaagctaaagaacaacatcgagggaaatcggtgctttgtcctgtacagaaataaattgcatagactactaatcttctttttttctttggggaggaacaatggtctctccgttgagtttagtattgatctgccaaagctcgtttcttacattggctttgtaccacactcagtaagaaatcagtgaatacatgctcatactctggcattttcccgtaccctgggaaatagttgatgtcgatcacataaaaccgatctcttgtcccgtgctctctaattatgtctaaattgaacagccttagacccaatccacgacggagttcctttgccagtctctccaacagaggacgtggtggaagctcggcaatgctcgggtccagatctgcatcatcagctgaagctgcagcacaagagacccgtgggaagcggaatacaccagctgatttggggagttctcgtctagagacatcag

SEQ ID NO: 314 - DNA, 687 bp, Arabidopsis thaliana
ccacgcgtccgcgcaaaggttgctgatttcggtctctccaaacttgtgggggaccctgaaaaagctcatgtcacaacacaagtgaaaggaaccatgggctatcttgatcctgagtactacatgacgaatcaattgacggagaagagcgatgtgtatgggtttggtgtggtgatgcttgagttattaaccggtaaaagtccgatagatagaggcagctatgttgtgaaagaggtaaagaagaagatggataaatcgaggaacttgtatgacttacaagaattgttggacacgacaattatccaaaacagcgggaatttgaaagggttcgagaagtatgtagatgtggctctacaatgcgtggagccagagggagttaataggccaacaatgagtgaggtggtgcaagaacttgagagcatattgcggcttgttggattaaaccctaacgccgattcagcaacatacgaggaagcatctggtgatccttatggtagggattcgtttgagtacactggggttttcccaactccaaaaccctaacgcaataattgattaatttgttctttctcagttttttattgttttgttttttggttattttgtaagtgactttacaaccttaaatgccgtgtgaatgtgtgtgtactagcatgatttgatttttgatatatgttgttttgtggtcgc

SEQ ID NO: 315 - DNA, 687 bp, Arabidopsis thaliana
agtaaatataaggtaccttcgacgcaagcgaaagcgatgattcgttcggcgaaagtctgagaaccgtcgatccatttcatagcccattgagctttcttggcgacgcaagggattgtttcaatggcacgaaagagatgatctctctctttgttatctttgatataagtatcgagaaggagactatacatctccgagtggatgttttcaatcgcgatctggaaaccgtagaaagcacgcgcctccgagacttgaacatcggacatgaagcgagaagcgagattctctagtacgattccgtcagatgcagcgaagaaagcgaggacgtgtttgatgaagtgacgttcaccgtcgttgagactgttttcccagtcgcggttgtcttgtgatagatctacttcttcggcggtccagaatgatgcttcggcttttttgtacatttcccagatctgtgggtagtgaattgggaacatacagaatctgtctggggttggtgttaggagcggctcttctggcattgaaggcatctttgaagggatttgaagatttgattgaagaagagatttgattgaagagattgtttgattgatgaattataagatctagggctgaatatttatataggagattatagggttttggggtttttgaatttttgacgtgaagagggaaaatagaggagggaaatat

SEQ ID NO: 316 - DNA, 687 bp, Arabidopsis thaliana
aaggatttgcttttacgaacagagagcgagccagagagagtgagtaagagagaatgacgagcgtgagtgggtgtggttcagtgagtctgataactaaccgcagtgcgttcttgggaaacggacttcaacaccgtgccgttttccttaaaccatggtcgtcttcttcgcttcagtctcggtccatggttgtcgaagccaaaaccaaaaccagcagcgaagacagaatcgcccgccactctcgtatccgtaagaaggttaatggtacaacggagaggccaaggctatgtgttttccgatcaaacaagcatctttatgttcaagtgattgatgataccaagatgcacaccttagcttcagcttccactaagcagaaaccaatctctgaagagttcgactacacctctggaccaaccattgaggtagcgaagaaagttggggaagtgatagcaaaatcttgcttggagaaaggtatcacaaaggtagcctttgaccgtggtggttacccttaccatggacgtattgaggctcttgctgctgcagcacgtgaacacggtcttcagttttaaccgtcgttttctttccttgtttctttccgatgaacagcagtgtatgaatgtagagaacccattttccccaattgaaatgttgagatttttctaaaaaaaaaaaaaaaaaaaaaaaaaaaaa

SEQ ID NO: 317 - DNA, 686 bp, Arabidopsis thaliana
gctcagggaaatgacgatgacacaccggcgccggggaatcagtttgcccaattcggagctggatgtttctggggtgtcgagctggcgtttcagagagtcccaggggtgactcagaccgaggctggatacacccaagggaccgtagacaatccttcatacggagatgtttgttctggtaccacaggccattcggaggttgttagggttcaatatgatcttaacgattgcacctatgagtctctgcttgatttgttctggtctaggcatgatcccaccactttgaatcgccagggaaatgacgtgggaacccaatacagatctggaatatacttctacacacccgagcaggagaaactagcccgtgagtcacttgaacgtcaccagcaacaaatggagagaaagatcatgactgaaatcttgccagctaagaaattctacagagctgaagagcatcatcaacagtatctgtcaaaaggtgggcggtttggccaagggcaatccactgccaaaggctgcaacgacccaatccgctgttacggctaataagctgctttcctctgtccctctccgaaaacagaggacttagcatcaaaggacttgtgtgtcaaatagattgtgtaaaacttgactaagttgttcacacgctatgtaactacttctttggaatttcattcgcaatgttgtaa

SEQ ID NO: 318 - DNA, 686 bp, Arabidopsis thaliana
agaagaagaagaagttctcggcgtgcttcaatggcgatatcagtagcagcttcgtcctctatggccgtgatggttccacgtgttcccgccgtatccacccgttgctccgccgtcccttatcttcctcctcgctcctttggccgatcctctttcaccgttccgttgaagcttgtttcagggaatggattgcaaaaagttgaattgttgaagacaagagcttcttcagaagagacctcgtccattgataccaacgaactcatcacagatttgaaggaaaagtgggatggtcttgagaacaaatctactgtacttatatatggaggaggagccattgttgctgtttggttatcttccattgttgttggtgccatcaactctgttcctctgcttccgaaagttatggaacttgtcggtctcgggtacactggatggtttgtctacagataccttctcttcaagtcaagcagaaaggaattggctgaggatattgaatccttgaagaagaagatcgcaggaagcgaatagattcattttcaaataaaaccagctttctctctgtatgttttcctgtaatatcgtgttatattatacaatgtctctgtttcaacattgtatctgttgcatctgaaactattatcttggatccacacttagtttcaggaggcacataaaaaaaaaaaaaaaag

SEQ ID NO: 319 - DNA, 686 bp, Arabidopsis thaliana
attcgaccgatttcgtagggcttaactactatacttcaacattttcaaaccataatgaaaagccagatccgtctacaccaagttggaagcaagattctcttgttgcttgggaacctaagaatgtagatcacagcgccattggtagccagcctcttaccgctgcattgcccgtctacgctaaaggttttagaagtcttttaaagtacatcaaagataaatacgcaaacccggaaattatgatcatggaaaatggatatggagataaacttaaggacaaagattcggttgaggttggtactgctgattataacaggaaatactatcttcagaggcatcttctagctatgaacgaagctatttgcattgacaaagtgagagttacgggatactttgtatggtcattattagataactttgaatggcaagatggttataataacagattcggactctattacgtcgatttcaaaaataacctcacacgttatgagaaagaatcagccaagtactacaaagatttcctcggtcaaggtgttcgtccatccgcgctcaagaaggatgagctttaagttatattttgaggatttggttttctgttcaatgcttctttcctatgttttagtttgtgattgatcatgattcatgaagtcttggttaataataataaaagtgttttgtattcaaaa

SEQ ID NO: 320 - DNA, 686 bp, Arabidopsis thaliana
  misc_feature (1)...(686): n = A,T,C or G
taaataacttgagaatcttccaacacagaaaacaagaagagagaaaagtaaactggcaggtaattttaataggggacgacgacgaaacacaggacaatataaagaaacataaacttagagagtcgctgcgaccgaccacagtaacccaacgagagcttctctctcagcacttgacctccttcaaaccatgagcgaagtacaaaaatgttgggttanttgaaccctccttgtagtaagcaaagaccaaagtgctgtcatcatgcataccctccccaacaaagaattggaagtcactgagcctggggagcaaaaacttggtaaaagatacacataacaatggttttaccatacacaacaaagaacaaactatggacaataaagacaaagacaacacctaatcttaagaagacgagagaaacatacttggactgtgtaaacaacagaggctacttgatagtgatgtagcggtttgtcccgtgcctagcccaatagtctttaagatcaacaggacacgagagatcatatccttctgctgataaacggctgagtaatctcgagaaaacgtttccgctcattttcctaccgcccatccgagaatgcctcttgtttggcatctgcggtaatggatactgggataaggtggttgtgcagcaagacgattgccagccgccatttccccatttgta

SEQ ID NO: 321 - DNA, 686 bp, Arabidopsis thaliana
ctcatctcaatctcagccatcattatcatcatcgttgtgacatcggagttgacgtcacgttgtggtcgtgattgttatacgtggttggtttcgtcgtcgttcatcaccggattgttagaagaaaacagttcaagtggtggaattggtgatccgtttcccgtcacgtctgaaggattttgggcgagttctcaacggttctgcgtagatctcgttcccaagttttcagaatagttttcggatctaaaatcggaggtagaggttttaaagatctatttcccgacggatctgaaagaatcagatcgtgagtttggtgtcgttggaaagatcttgaggagagaaaaaagtagcaaatttcgttttcacgatccaagtttcatcttaaggtttttaggaggcgtttctggtcaccccggagcataattagaccaagcgacggtggataccggtagaggaagtgttagggaagacacggaactttttgtcgtcactaggaaaggtcacattgagaattgtgtgtagtcgctcaagttcgtcttgcttatggtgtattttggaaacctcagatttattttctaatattgttattttcttatacgatttattaaatagttttcagtgatttaaaattatttgtaagacaattttgtatttgaattaagaaagtgaaatagacgaaagatataaat

SEQ ID NO: 322 - DNA, 686 bp, Arabidopsis thaliana
  misc_feature (1)...(686): n = A,T,C or G
ccacgcgtccgcgagtggaaacttttaaacaagagagggagagagtgaaatggcgacgtcgggaacatacgtgacggaggtaccgttaaaaggaacagcagagaaacacttccagaggtggaggaacgagaaccatctcttccctgacgctgttggccaccacatccaaggtgtttctgttcacgacggcgaatgggacactcacggaagcatcaagatttggaactacacattgggagatggaaagcaagaggaattcaaggagaggagagagatggacgatgagaataacacaatgaaggttgtaggactggaaggtcacgtgatggagcagctcaaggtgtatgagatcgatttccaatttattcccaagtctgaagaagattgcgtctgcaaaatcactatgatatgggagaagcgcaacgatgattcccccgaaccaagcagctacatgcaactcctcaagagcatggttattgatatggaggatcacgtccttaaagcttaatcaacatcaccatcatccctatatgtttattaagttgttttcaattatatctaataaagtgtgtttnctttcggaatactatattttcaattatatagaataaagtgtgtttcctttcggaatactatatacgtaccatgtggtttcttaaatcaatatataagaaaatgggttttgt

SEQ ID NO: 323 - DNA, 686 bp, Arabidopsis thaliana
gatctcaacgacgacgagccatggcttcaactttcagcggcgatgaaactgctcctttcttcggattccttggcgctgccgccgctctcgttttctcctgtatgggagcagcgtacgggacagcgaagagcggggttggtgtagcgtcgatgggtgtgatgagaccagagcttgtgatgaaatcgattgttcctgttgttatggctggagttttaggtatttatggtttgatcattgctgttatcatcagtaccggaatcaaccctaaggccaagtcttactatctattcgatggctatgctcatctctcttccggtcttgcttgtggtctcgctggtctctccgccggtatggctattggaattgtcggcgatgccggtgttagagcgaatgcacaacaacctaagttgtttgtgggaatgattctgattctcatctttgctgaagcacttgccctgtacggtctcattgttggtatcatcctctcttctcgagctggtcagtctagagccgagtgaaatccagagtatctctctctcttatcggctacagtccttgtaatgttttggtatattttactctgttttcttttgtggtatgtttttgagtttctcatgaaaacaagcaacatgggtgaaatttatttgacttttgtttcaaaacccatttcttttctttttcatttg

SEQ ID NO: 324 - DNA, 685 bp, Arabidopsis thaliana
caggtttcgtgaaaagaatctatcttgagcaatgtctccagctaaagttgatgtcaccaagaaagccgaccctaaggctaaggctttgaaagctgcgaaagcagtgaaatctggccaaatcgttaaaaagcctgcgaagaagatcaggacaaaggttactttccacaggccaaagacattgaccgttcctagaaagcctaagtacccaaagatcagtgctactccaaggaacaaattggatcattaccagatcctcaagtaccctctcactactgaatctgccatgaaaaagattgaagacaacaacaccttagtcttcattgttgacatccgtgctgacaagaaaaagatcaaagatgctgtcaagaagatgtatgacattcagaccaagaaagtcaacaccctcattaggcccgatggaacaaagaaggcgtatgtgaggttgactcctgattatgatgctttggatgtggctaacaaaatcgggatcatctaatctgatcattgtcgctctgtgattttactttttctggtttttctcttccatagtctcagttttgctagagaagttaagatattactatcaccatctctttgttatgcttttatctttggattcaaaaagattatatgtttggtatttgttgatgcgtcatagtttctattcagatcgtgttccaattct

SEQ ID NO: 325 - DNA, 685 bp, Arabidopsis thaliana
attctcaagacatggctatttacaacactctccgtgatgccgttagctccggctggacaccctccgttcctcccgttacctctccggcggaggaaaataagcctccggcgacgaaggcgagtggctcacacgcgccgaggcagaaggggatgcagtacagaggagtgaggaggaggccgtgggggaaattcgcggcggagattagggatccgaagaagaacggagctagggtttggctcgggacttacgagacgccggaggacgcggcggtggcgtacgaccgagcggcgtttcagctcagaggatcgaaagctaagctgaattttccgcatttgattggttcttgtaagtatgagccggttaggattaggcctcgccgtcgctcgccggaaccgtcagtctccgatcagttaacgtcggagcagaagagggaaagccacgtggatgacggcgagtctagtttggttgtaccggagttggatttcacggtggatcagttttacttcgatggtagtttattaatggaccaatcagaatgttcttattctgataatcggatataattagttttaagattaagcaaaatttgtccaacgagttttgctgtatgaaatatctatcgatgactcaacaggttttgatcatgatcatatgtaatgtgatggaaattaaatattgacgtttg

SEQ ID NO: 326 - DNA, 685 bp, Arabidopsis thaliana
ccacgcgtccgtgcaactgaaaacatcaccatgaccaccgattcttgcgtcagcctcgtaggtgaacgaaatggagtgcctatcggtccagcggctggatcggattggcttttgatatatcccaagggtattcgtgatctcctactacatgcaaaattcagatacaatgatcccgtcttgtacattacagagaatggagtggatgaagcaaatattggcaaaatatttcttaacgacgatttgagaattgattactatgctcatcacctcaagatggttagcgatgctatctcgatcggggtgaatgtgaagggatatttcgcgtggtcattgatggataatttcgagtggtcggaaggatacacggtccggttcgggctagtgtttgtggactttgaagatggacgtaagaggtatctgaagaaatcagctaagtggtttaggagattgttgaagggagcgcatggtgggacgaatgagcaggtggctgttatttaataaaccacgagtcattggtcaatttagtctactgtttcttttgctctatgtacagaaagaaaataaactttccaaaataagaggtggctttgtttggactttggatgttactatatatattggtaattcttggcgtttgttagtttccaaaccaaacattaataaataaataaataaaagagtttga

SEQ ID NO: 327 - DNA, 685 bp, Arabidopsis thaliana
  misc_feature (1)...(685): n = A,T,C or G
aatctcgagctttggggattcttcttgttacaaacgaagctatacatttgttgatcacatttgggtctctctactcttcttggcctcctctttcctggtgttgagcttcgttaggcaatgtctgaggagnnttcctgaatacatgtttcctgcaccgctcaaagatactgtcgtagatcaaatcgaactccacacctgctcgctctcnntttnnnnnnnacattatatgatctgcctccacgatcttgtagtaccaaatgcctggttggagagggagacagtctgagtcactacgaagaatgagactagaatgttcaaccggaattcgtgggtgagtcatggatattgtgttcagtgctccatcattgtcctgccaatcttcatctctgtagcctttataaggcagaggaatgtcacgaggaaattgccactgactcatctgcaacacgcggatgaaaagcagaggatgaatccccatcacacctgaaggaacagtcatcattccaagaggtttagtggtacgcttagtcgcatagctgaagtagaacgtgtttggaaaagtctgcagactagcgtttagcttcattgatccctggattgagaggtccggcaagatccaatctccacatgcagcaaaaggacctgcgtttccaagcagaagatcgactaggccgcgtacaccagt

SEQ ID NO: 328 - DNA, 684 bp, Arabidopsis thaliana
tgcccttggaaactacctaatgagcaagggttaccagattgtgaccaatggaactgagaaccaccttgttctctgggatcttcgccctcttggattgaccggaaacaaggttgagaagctctgcgatctgtgcagcattacattgaacaagaacgcagtatttggagacagtagtgctcttgctcctggaggtgtaagaatcggtgcacccgcgatgacatcgagaggattggtggagaaggactttgagcagataggagaattcctgagccgtgcagtgacactgacgttggacatccaaaagacatacggtaagttgttgaaggacttcaacaagggtttggtgaacaacaaagatctcgatcagctcaaggctgatgtcgagaagttctcggcgtcttatgagatgcctggattcctcatgtctgagatgaagtacaaggattagagatctttctctatatgcaagagtaatcttctattattatctaccatatatataaaatatgcttttgtaggatcgccttaaaggcgaagagatgaagatgcaaacagtaaaaaaaaagggttttcttttcagctatttcttcttgaatgttttttttctttttcttttggtttcttattgaaattgttgtatttttgttggcttttttctaataatatcagcgagtttttcaaaaa

SEQ ID NO: 329 - DNA, 683 bp, Arabidopsis thaliana
gcggccgcccaatcgattcgattcttaagctttttcgtcttctccgataaggtcactacttagaagccgcgttgtggtttagttgactcctccaggttttatcttcaagctttttcgtctatcagatctggtgtcactgtcttctcataggattacatagagatggggaaaaaagctaaatggttttcaagtgttaagaaagcattcagcccagattcaaagaagtcgaagcaaaaattggctgagggacaaaatggtgttatctctaatcctcctgttgtggataatgttagacaatcttcttcttctcctcctcctgctcttgctcctcgtgaagtgagagtagctgaagtgattgttgaacggaacagggatctttcacctccttctacagcagatgctgtgaatgttacagctactgatgttcctgtagttccatcttcatctgctcctggtgttgttcgtcgcgctacacctactcgatttgctggaaagtcaaacgaagaagccgctgctatcttgatccagactatatttagaggttatttggcaaggagagcgttgcgggcaatgaggggtttggtcagacttaagttattgatggaaggatctgttgttaagcggcaagctgcaaatactctaaaatgtatgcagactctctctcgtgtacctcggccgcgacc

SEQ ID NO: 330 - DNA, 683 bp, Arabidopsis thaliana
  misc_feature (1)...(683): n = A,T,C or G
ggtgacaaaaatatcttttcttgatttaaaaattaaatatagcaatttcgagggaaatgtgtaggtaaactggtgattatggctcaatccccttcacaaggggggaataaacaacacaatcaccacatttttgcttcacaattcaactgaaaaaaaagaagaagcacaacagagcctgagaggccatagggttggataaggaataggagccgagacttagaaacatatttctctcgtccttcaacagtttttactaataagtctcaagatacagttcggccatagcttaacgatgcaaggtagagattctttccccatttttccttgacgtgtgtgctggggaattgagaggtacgtaacgtctcttgtgtctcatcaacaagtctacgacgtgggatgcttaggatgagagcagcttgatcggttgtggctgctgttgatgtgattctgaatccaccatcccaacgcctgtggatgccttcacttggatacagaaaatcaagttccacaacctgttcactgtagccagaattgcgggacataacaacaccccatcgatttccagctgttgccattgaggttacatggaagccttctctccatttcttgtnnnnncacttgaacgggaatgaatcgcttactttgtaagactgctgtgtatactgcgtacctcggccgcgacc

SEQ ID NO: 331 - DNA, 683 bp, Arabidopsis thaliana
ccaataccttggtttggatgttgaggaaaaatcagtcggttttgaggatttgaaggttaatttaattatgactgattactcaatgcccggtatgactggatatgaactcttgaagaagatcaaagaatcctcagcttttagagaagtaccggtggtaattatgtcctccgagaacattttgcctcgtattgatagatgtcttgaagaaggggctgaagatttcttactgaagccggtaaaactctcggatgtaaaaagattaagagattctctaatgaaggttgaagatttgtctttcacaaagagtattcagaagagagagctagaaacagagaatgtctaccctgttcactcgcagctcaaacgcgcaaagatctgagctctccgatgcaaattccgtgactggatcttagaaaaagccttttcatatacagaagcttcaagactcaatgcacttgagcctacactgatgattctcgccagcttaatgacctatacaattttccaacccctatggcctttttcgctgattgaattcagtgggtttattcatatagtagtaatgtaaatggtatagagatgagcaaaagctatattatatattatattcattagaggggtcatagcttttttccttacaagagatttgtaagctggcttaatagaagttgttaaggcggccg

SEQ ID NO: 332 - DNA, 682 bp, Arabidopsis thaliana
  misc_feature (1)...(682): n = A,T,C or G
aaatataatatagtttcattatttgattagcttagatccaacactctagataattgaagaacaattannnacataaattactagatagcacaaatgctacacacctccgccctctaagactggtgaagcaaacgacgcaagacaagacaaaaatgaaacacacaaataacacaaacaaacaagtctctgcataaatatgagtaagctcttattgtctcattcatctttctaagagcatcgttcacgtgccaaaccgagccgtccattggggacgtcgatgaggacacggtggttctgctgctgcatgcttgcgatcacattgacgacagagtttacgttttccggcgctgcagccatggcgaggcacgacgtgcttccggcggtactgtgtaacatcaggttatcagccggcatcgtcatgttcactcccttgaacatgaatgttatcgtcggcaccttgacttgccctgagtagcacgtgtcgaaacccccgagtgacgtcaccacggctgtggttggcttcacgcgcttcctgaactcgttcctcactgcctcgtaaaccggtttagccagccgcgtgtacacagttccggagtcgaagatggttccagcgccggttgaaggattaaaagcaatagctgccggcggtaaatcgacgactttccgaccaacgcggatcgca

SEQ ID NO: 333 - DNA, 682 bp, Arabidopsis thaliana
tcgcgatctagaactaggagaaaggaagacgaaggaaggagaatagtagaagaagaagaaagggagagtcttgtgatatctacgtagaaggaagatggccttatctcaagtgtctgcgtctctcgccttttctcttcccaattctggtgccctaaagctagccacaatcacaaacccaacttctacatgtcgggttcatgttccgcaacttgctggaatccgatccaccttcgcttctggttctcctctcttgccattgaagttgagtatgacccgtagaggaggaaacagagcagcatcagtttccataagaagtgagcaaagtacagaaggaagcagtggtttggatatatggcttggtcgtggcgccatggttggttttgcagttgccattactgttgaaatttccactggaaaaggacttcttgagaattttggagtagcaagtccattgcctacggttgctttagctgttacagcattggttggtgttctagctgcggttttcatcttccaatcttcttctaaaaactgatcaacaagaatcttgtttgtgatgctgccgaggatcattttcttgtattaagaatcttgtattatatatcactgtaacttctacatccatcagtggaaaaaatcttacattcttagttttttttggcaacatacatgatcaaaaacg

SEQ ID NO: 334 - DNA, 682 bp, Arabidopsis thaliana
tcgagcggccgcccgggcaggtattttcagaagcttctttggtggtggtggaatgaatcctgctactactcaattccgatcattcaatttcggtggaggaactagaacagctaattaagcttctgatacaggattcaatcctcgtgtactccttcaaatacttcctgttgtgttcatactacttctcaactttttgccttctcctcaaccaatttactcgctttctccatcgtataactacgagcacaaattcaccactcataggggtgtcaattactttgtgagatcagccaagttcgagcaggaatatccgataagtagcttcgagagacagagggttgaagagcaagttgatagagattacttgtctatacttggccagaattgtcgccatgagcttcagagacaacaatggggatatatccgcgaaacgccacgttgcgacatgatgaagaggtttgatgcagctgctgcataaaccatccaggtcagagagagactgaagcaccaagttagtaaactcaaatccaagaaacttggttggattgttctgagacatagctatggtacttactaacttctgagcatttttgttgatgcttcagtagtttgatttctaagtcccaaactcatatacgttgattactgtcctccttatgatgtttagtatgaaacatattat

SEQ ID NO: 335 - DNA, 682 bp, Arabidopsis thaliana
  misc_feature (1)...(682): n = A,T,C or G
ctttttttttttttttaataatagctaaaaagccgaagataaactggaaagggctcagttcgaacaaaggtttgggaattacaaatcacatttaaacagagatgactagacaaactaaaaagagtattacagaagaagaaggagatcatgaagatgattacttggaaactttcttcttccctgcaatagcaattttcttgcctttaagagtcctgcagttgttcttggttctctgtccccgacatggcagcccttggatgtgccttaccccacggtaacactggatctccttcaacctcttgattgcaagagcattgaacctcctcagatcaccctcaatcatgtacttggagacttcatcacgaagaatgatgagttcttcctcagccatgtctttagtaatcttgttctccatctgaagatcaacaagaatctgacgagccctagttcgaccaatcccatgaatgtactgaagagagtactcaattctcttattagccggaatctccactccaccaacacgagcacanctgatgcttagactctgcttattgggagtgttnnnngctgggagggcaagggtgttgcgnnngagaggattnnnttttgcccaattgcaaatgagtgagagcgagtgcgctacgggcatcgcaaccatctgcgccattgttatgttctcttc

SEQ ID NO: 336 - DNA, 682 bp, Arabidopsis thaliana
ttttttttttttttttttttgggaaaccaaatgtgattcaaattacaacaatttctcaacaattccagacgcaaactatactaaacaacacaaaagaccaatcaaattccagaaaagataacaacttctttttttttttttataaaaaccttaagcaatggagactttagcaccagcttcttcaagagtcttcttagcttcttcagcttcatctttagtgataccttctttaaacttctttggtaatccttcgattagctccttagcttccttcaacgccaagctagtcaaagccctaacagctttaattactgcaatacgagaactactcggaacttcattgataaccacatcgaactctgtttgctcctccactacagccgccgcgccaccgtcggctggagcagcaaccgccgctgctgcgggggctaaagagagtggggagacaccgaatttgtcttggagatagtcgacgaggatacgagcttcttcgagggttagggatgagatttcggatccgatcttctcgattttctccggagcttcgacggcggcgattggacggagatgggttgcacggtgggtcaatgtggatgatgaaccaccaccgaagcgagaggggaattcgatggtggtggttcgggaagggaagtgattgatggaagcgagagtaggcggccgc

SEQ ID NO: 337 - DNA, 682 bp, Arabidopsis thaliana
caatcggcatatcaatgggaatctacgatatgtgccacaggtatctgaaggagaggaaacagtttggagcaccgttggctgctttccagttaaaccaacagaagcttgtgcagatgctgggtaacgttcaagcgatgtttctaatgggttggcgtctctgcaagctgtatgagacgggtcagatgactccaggtcaagccagtttaggaaaggcatggatttcatcaaaagcgagagaaactgcttcgctaggtcgggaattacttggtgggaatggaattctagcagattttctggtagcaaaggctttctgtgaccttgaacccatttatacatacgaagggacttatgatataaacaccttagtaacagggagggaagtaacgggtattgcgagtttcaaaccggctacacgtagccgtctctaagttaaaaggttgtccattgtttgttgttgtctgttggttagtattgatattgtgatgtggggtttacatctacaaatgtgccaaataatctgacccaaaaagatttagggtccaatgggggaataatatcgttgttgcaaaacataatccagttattgcttcttgcaatatggattcgtcttgtggcttgtactgggggaaataccatttgttaaccttttattaattcaaattgccaatgtcaaaaaaaaaaa

SEQ ID NO: 338 - DNA, 682 bp, Arabidopsis thaliana
  misc_feature (1)...(682): n = A,T,C or G
ttccagagatacgatgagtcgtctgattcaacattctacgaagctccaaggtttgtgacacacattgatgatccagctatagctgcattgacaaagtattactccaaggttttgcctcagagcgatactccaggagtgagcatactcgatatgtgtagcagttgggtcagtcattatccaccggggtataggcaagaacgaatagttggaatgggtatgaatgaagaagagcttaagcgaaatccggttctcaccgagtacatagtccaagacttaaatctcaattcaaatctgccttttgaagacaattctttccaagttataaccaatgtggtaagtgtggattatcttacaaagccgcttgaagtgttcaaggaaatgaacagaatccttaagcccggaggactcgctctaatgagcttctcgaaccgttgcttctttactaaagcaatctcgatatggacatcaactggcgacgcagatcatgctctcattgttggatcatactttcactacgccggaggatttgaagctcctcaggccgttgatatatctccaaatccagggcgttcagatcctatgtacgttgtttactctagaaanctccccatggtttaaacnnnnnnnncaagcacatcatgtatacacatagtagagaccgaggaaactaattcttcgatta

SEQ ID NO: 339 - DNA, 682 bp, Arabidopsis thaliana
ttttttttttgttacaatttctgcttttatacagaacctgatgggaaaactttaacttttatcccttatcggtcggtccattatttgtcgactcggaaacaagaggtaattaagaaaagcatcataaaatatacaaacaaaactcaaaatcaaattcaaacatatcaacatagacatgcataatgttcatcatcatgatcatgatcatgaattcatgatcaatgacccattggaatactcggctcatcatccaactcaatccccacctcagctagtcttttttccttgtaaacgtaccacttggagaaaactaggaaaatgaggaagttcaaggcaacaagtacggccacaagccagtagaaattgtaaagacggcccttgttgagatcatcggcaatccatggatgagctttcccggtgaatttctcgacgattgtcacgagaaccgagctgaagaaaaagcctaatgccaatgtgctcaacaatagacccgtgctcatccctttcatacctttagggcactctctcaagaagaaatctaactgtcctgtgtagattaacgcttcgccgataccgacaataagatattgtgggatgagtagataaaaccctagaggaagcgttttgactgttggaccatgagcgtgtgcagttctaagacgtttgagctcgaccaaagcag

SEQ ID NO: 340 - DNA, 682 bp, Arabidopsis thaliana
gccgttgggttagccattgccgccgagcagagaagaagtgtcggcaaggttgaaacagacagagacaagcaatatgattactgtgtgtatggtactgacattgctacaagttatggagctggtgcatttgttcttctctttgtaagccaagtccttattatggctgctagtcgttgcttctgttgtggaaagtctcttaaccctggcggttcaagagcttgtgccattattctcttcctcatttgctgggtgtttttcttgatcgctgagatgtgtttgcttgcggcatcaatcagaaatgcgtaccacacacagtatagaaagatgtggaaagttgaagatccaccaagctgtgaagttataaggaaaggagtttttgcagctggtgctgcattcacactcttcaccgccattgtctctcagttctactacgtttgctactctcgtgctagagatgcgtaccagaatccctcctactaaaaatgtcaacttccacagcaagcaaacgtttaagcatcaagagttggaatttgtctttttgtgtttgtttagtattgtccagtgtttagttatcctatcaggatgtttaggttttatgttgtctcttaagcaaacactgatatgttatattctaagattcgtatattgttatgttctctgttgtaatgtgtgaatgaatatt

SEQ ID NO: 341 - DNA, 681 bp, Arabidopsis thaliana
aaacactatttattgataacacaagtttctcacaagtaattaataacaaacagcataacaaacaaaacaagaaacatatatagaaaacaaacgacttaaaacataaacatcgataaaagaacttaaaacataataattatgaacctttcgaccgatctttggtttatagagagcaaaaaaacaaaaaaaaaaaacgtttaacatcaatggtgaggaattacgccaccgcaatcgcttccaccgccaattccacccaaaccaccaacaccgcctataccgcctagaccacctgcaccgccgagtccaccgataccactaccaataccagggtcaccaccaattccacctactccatgaccaagacctgaaccaccacctagaccacctagaccgccaagaccacctacaccaccgcctagaccaccaattccgccgcctacaccgccaacaggcaaaactccggcaacaccaccaactccaccggcgacaccaccaagaccagctccaacaccaccggctccaccaattccagcagctccaccgacaccagcgaacgctacaaagttcttttggtcgtcaagaccagctccgacattcttggttggagccggtcttgttgcggtgactgcttgagacaccatgagagcaacgaggaacacggctaaacacctaactgccatc

SEQ ID NO: 342 - DNA, 681 bp, Arabidopsis thaliana
attagaaaccctagagtgatgaagaaggctcaagaaagtattcgaaccactctgggtctcaagaaggaaagaatcactgaagaagatttaggcaaagttgagtatttgaaccacatactcaaggaaacttttaggttacacccggcacttccatttgtggtgccaagggaaacaatgtctcacatcaagatccaaggctatgatattccaccgaaaacacaaatccagcttaacgtgtggacgatcggacgtgaccctaagcgttggaatgaccctgaagaattcaaccctgaaaggtttgcaaatagctctgtagattttagaggacaacattttgacctattaccgtttggttctggtcgaaggatttgtcccggaatgccaatggcgattgctagtgtggaactagcattgatgaatttgctttattattttgattggagtatgcctgatgggactaaaggtgaagacattgatatggaagaagctggtaatatctctattgtcaagaaaatacctcttcaacttgtgcctgttcaacgttattgatgagcaataatataagctcgataacatggaaagtgtatgaagcaaaaaacataagattctttagattttgttgtgttatataagaaagaaatgttccaataataaatcaagaaagaataacttttgttcatt

SEQ ID NO: 343 - DNA, 681 bp, Arabidopsis thaliana
gcgaatcgctcgaaattagggtttctactgagagaagatgcgagaaatcataagcattcacatcggacaagctgggatccaggtcggaaattcgtgttgggagctttactgtctcgaacatggaatccagccggacggaatgatgccgagtgatactacagttggtgttgcacacgatgcgttcaatactttctttagcgagactggtgctgggaagcatgtccctagggctgtcttcgttgatctcgagcctaccgttatcgacgaagttcgtactggtacttaccgtcaacttttccatccagagcagctcatttctgggaaagaagatgctgctaacaacttcgctagaggacattacactgttgggaaggaaattgtggatctatgtcttgaccgtgtgaggaaacttgccgacaactgtactggcttacaagggtttttggtgttcaatgctgttggtggtggaactggttctggattgggttctctgttgctagagcgtttgtctgtagattatggaaagaagtctaagcttggttttaccatatacccttctcctcaggtttctactgctgttgtagaaccttacaacagtgttctctcaacgcattcccttcttgaacatacggatgtagctgtcctcttggataacgaagccatctatgacatttgccgcag

SEQ ID NO: 344 - DNA, 681 bp, Arabidopsis thaliana
ttttttttttttttttttgatatgaatagagatttttatagaggaaacgatagaaaaacaaaccttcagttttttcactttggcaaaataattacttaaatttacattgaccatacaaaattgggttccggatagtcaacattgaatattccagaaaaggatttaagcatcagtgaagcttgggggcttgtaggcaatgaaactgatgcattggacttgacgggtgttgtcgaatccgatgatcctaatgaaggcgcccgggtactccttcttgcattcttcaacttccttcaacacttgagcggagtcggtgcatccgaacaatggaagcttccacattgtccagtaccgtccatcgtagtatccgggagtgtttccgtgctcacggtacacaaatccgtgctccaactcgaattcaacacaaggaatccatttgttgcggagaaggtagtcaacttccttagccaattcgacgtcagtaaggtcagggaggtaagatagagtctcaaacttcttctttccgattggtggccacaccttcatgcagctaactcttcccccattgcttgtgatggaagtaatgtcgttgttggccttgcgggtgaccgggaaagaagcggatgacttcaaaccagtgaatggagcgaccatggtggcttgagccggggaggtaaccacagc

SEQ ID NO: 345 - DNA, 681 bp, Arabidopsis thaliana
cttttttttttttttttagaaacaaaatgattttttattattttatatgcattcttcacatttccgagcacagtttttacacgtcattacaaaacgacaaaaagcaaagagagagccctatccacaatccaaacccgagacccaaacccgaaagatttttttatacacacgctcgcgtgcaacttgattttgactacacatgccgtctagatctcgtcatcgctctcactactatgccacgtgtcttactcacatcccttggatcaaaccagagtcttgcacgtcgaactctgcggatcccacatcgccggcaatagatatttcctaccggcgagtccacgagcgttgtaactagacccggttgttttgtcaacaagtacccgacccgcgtaacccggataagaacctgacccgaatataccaggacaagcagacacagcttcaagcggtgcagttggtgggccttggtaatatccgttattaaacggattcgtcacggtgttagctagaagtgtggcaaggtttataatcattccgtcaactccaacgtcaccgttaggcgctactaacggcggcgtttgtggtccgtaaatcggctggtgaaacggccacgcgcaatatccagggcactgcgtctcggagttcccgacccatacgtaagccgcgccgttagctgcgcga

SEQ ID NO: 346 - DNA, 680 bp, Arabidopsis thaliana
tttttttgtatgcagcatcggatcaatctttttgcacaaaaattcaagttatttatacaacttattttgcaaccaaactcgcttactgatttagcaaatagaaacaacatgcaagatattgcatccaaatgaaagaaaaaaagacgaacacacccgatgactcatggtcgacaacacgatttagaagtgatgtcatgtgatgctaagatgcgatttagatgtttgtaatgatgtgactttattttgacacaagcaaagttgtgaacattaagaaaacatagtgattgagaagcaacgagatgttggctcatcaatcttgtagtcgttcatagcataattacaagcattcttcaccacaacttagtaaaccatatttcataaaaccatcatctatcattttccatttcttcacatcttcgacattgagtagtccatcgcttccacgagaaaatctgcatcgtccttggtgaagcagagaggtggtgtgattctaaagacatttccaaagtagcctccttttccaatcaacacacccaattctttcatttgatccataatgtgcagagtctcggcggttgcaggagtcttaagcttgcgatcactcaccagctccactccaagcatcagtcctcttccccggacatccccgataatctcgtgtttttctttcagctgtgtga

SEQ ID NO: 347 - DNA, 680 bp, Arabidopsis thaliana
ccgggcgatgtctcatgtccagcctgtgcttttcttcctcgcatcactcttcttcttactggctttgtgcagcgccaacgattttgaatattgcaccaaaaatggacatgattatggtgtcgtctcttggatcgaggtctttcgggttgggcctcaggaaaacccaaccctcactataaatgtatttggtactgcgacgaaagaaatatccgcgggaacccttgtatatgtagcctatagatctggggattttacaggccttttaaaaacttacgacctatgtgatgtgagtttggcatgtaacattgattctgagattgaagctggcgacgtgtttgacttcagtcttaaagacgttctttatgttggttttgatgagggaatcaagtattccgtatctttgcgtcaaaaaaccgcagaggaggaggatccaataataaaaatgtgtatcgacttcaaagtacctgcctcagcttctgcatttgtctctatttagtcacgttggctgatgaaaagatgtttccaactctttcattatatgactctttctcgcttgcatttttccttttttatgtgttgtccaacaaataaatcaaatccttgaaccgatatcgctatagatattgctttgttgtaattttggcctgattaatatgaaccaacatgcctttccttgaaaa

SEQ ID NO: 348 - DNA, 680 bp, Arabidopsis thaliana
ttttttatcttgaaatcatagcaagattgcccagtaaacactgtcacacataaagcttacagaggtttggctaatactatgtataaccaacctgagtcagagaaaatactcatacaaatgaaaagatctaattatttccaggaagaagacttcttccaaatgtcgagaatacaatactggcaagacatatgcaaacttgagcaagaactgaagcagcataaacagtacagcttatgtgaaactcgaaaagtaaacatcaccagttcaaaagtagttgctggtgtagaaattcttgagaaaatcagtctttccttgatccttgtttccagtattctgcacgagcccttcacccaccacatattgaccgatgatgtggtgacgctgctttgcgtgatccacaatgtcagtcagctcttccattcctttgaatataagaagatcaattaccttaggatcggtgatgtgagcgttattccgaatctgagcagagatagcatagcggagctgagaaggagcgacgacatcttgaagattgtaaatgtccatgatggtggggatagatctacaggcagctctaaagaaatcgaaaacacggcggcgagcttccgtcaggttcgccgagttcggaggaacaccgattttccttaacgcgaatggtgccgccattttgatctacgaaa

SEQ ID NO: 349 - DNA, 680 bp, Arabidopsis thaliana
atattaatgagtggcgttgtggattctgcaaaaaggctttttatgaagagaagtatctcgataagcatttcgattcgcgccattacaatttacttaatgcgagtcatggtaaatgtctgtcggatctttgtggagcgttgcattgtgatcttgttgtagacacagctcggcttaagtccaagtgtaatcctgcagctgctgcaaaaaaccggcacttatgtgagagtttggctaatagttgttttccggtaaataaaggttcatcagccaaccgtcttcacgatttcttcttgcgtcagttctgcgatgcacatacatgttcaggaggatcaaagcccttatctcaaaaaccaaagaagaggagtatagtgtacattattttctccatcatcgttttggtagtgcttcttctctattacagctttgtctatttgttccgaagaggattaaagagaagatctcaagatttgaagcgtattagacacaatggtctgaagaagaaacccttctaaccatatcaagctttagctttaatggcggctgagagagagtacattttttttctttgcaagatgattacaattaggatcagattagtgcattttgcaacatcccttacaattatatcactacttacaccaatattgttacttagaattcaatagtgtttactgcaacta

SEQ ID NO: 350 - DNA, 679 bp, Arabidopsis thaliana
agttggcttataacggcgtgagaaattcaatgttgcatttgcatttgatccgaatatacatattttatatttataatatatatgggctaatgacaggcctattaagtagattcaattgggctgatgaggtgaatcaaacggcgtcgtcttggcgtaggaagtgaacaaatttagaacgtatagaagatgggatgcgaacaggacggtacttgttgtcaagccacacagctattccttttgcctccaatataggctcttgatttggaagtttaaagatgaaatgatcgaagtaaatacgcgcagcagatgtccccgatatcctcgctttcaccacgaatttgtctccgctacgtaaaggtgaaaggaacttcattgtcaactctgaaattgctaaggcttccccagaacgtgctacttcgtcgcagttgataccgatactctctagaaactcatgtcgaccgtgttgacagtagtttgcgtaaacagcattgttcacaacaccaaactgatccaattcataatcacgaactttgagttcaacctcatggaactcactcattcctttgcctcctttgagatcgaagaatgctagaggcttgaaggtttttacgctccggagaggaatactaagtggtcgtctccatgaattgagaaacactaccgcaggcatagccggagt

SEQ ID NO: 351 - DNA, 679 bp, Arabidopsis thaliana
tgttgctcctggaacattgctgggaacctcacacacatacgttattaagactggtactcaagaaaagacgggagccaaaagggttgatttgctgagagggcagaagacagacagagtggatgtcagcttacagccagaagagctggatgctatggaaaatgttttacctgccaagtatgaggaggcaagagaagaggagaaattgcgcaataagccagtggacttgagtgacatggtcgtcgagcatgtgcagcagaatagtaggaagaggaaaatgcatgacaaggaagggaagaagaagaaagatttcaaattctgaggtgttctggaagagacacggaaaaggattctggattctggacatgagagagatagggagagattcttgttccagagttattagtctttgagtcagagatcttgagttttagtcttaatgcttatgagattctatactatgttgttatctgaaggcttaagtaaaactttgtttttggaatttgaacaaattcaaagcctgagacttggaacaaaaaaagtggggaaaaaaggctttgttttgtaagcgacgtcttgtttttcaaattgtccgagtactttcagcgtttatggtttttaaaagattgatcattcggtctacagaataaaccgtcgatgtgatctatttcagtgcaaaaaa

SEQ ID NO: 352 - DNA, 679 bp, Arabidopsis thaliana
cggccgctttttttgagtctgtaagcctctgtctaagacagaggtgtttcatagcaatagcaaaggccaattccctcacgaatacggaatacatcaatgtgcagaaagtgaagacaaaacaaattgatgtttttggaatatttatacatttgatgtgcatgaatgcatcattaaatcactggtgacttctgtacagatcgatgctccctagttgtagtctcgaggtcgaattcacgtctcgtacacttaaaaaccggaacctgaaaagatttgcttggaatccaggtgtagttattttgtaggatttgcgttggaaccgttcctcgaatacctgactagtttgcttgtctaggacacaccatgtcgaaccaccatcgttacttccttcaagaatccaatctttggggtctctctctggggcatcattagcagacatgagttcgtatgctatgagttggtgcatctggttgtagagtgttttgtacacgatccaacagccttttgcaccatttggttcttcccatttggactcttggattccatcaaaagctgcggttgcaatgccagaaggaagctcttcaccacttgcgaggacagaaccagagcataccctgttctgtttaacaagtggaaaagacagtgaatctttgtttaagttttggtatttgctgaggtcagc

SEQ ID NO: 353 - DNA, 678 bp, Arabidopsis thaliana
agaactttgccaacaagggtcttaacgctaaagaccttgtggttctctcagggggtcacaccattggaatctctagttgcgctctcgtcaacagtcgtctctacaacttcacaggaaagggcgattctgacccatccatgaaccctagctacgtgagggaattgaagagaaagtgcccgcctacagatttcagaacctcactgaacatggacccaggcagtgcgttgacattcgacactcactacttcaaggtcgtggctcagaagaaagggctcttcacatctgactctacgcttctcgatgacattgagaccaaaaactacgttcagactcaggccattctccctcctgtgttttcttctttcaataaagatttctccgattccatggtcaaacttggtttcgtccaaattcttaccggcaaaaatggtgagatcaggaagagatgcgccttccctaactaatttggatcgatcagaccgggtttcggatgattttgagtctacacgtttttctctgcttattttctttctttttcttttttctttcacggaagtttgagctttggtgttgtcttcttctgtttcttccatgaataattgttttttgttgagtaactttacatttgtattctttacggtgactgtgttttgtaatggaaaaagtttgtttcgaatt

SEQ ID NO: 354 - DNA, 678 bp, Arabidopsis thaliana
  misc_feature (1)...(678): n = A,T,C or G
aaagctagaacaaaaagaatcgagcattagaacgggacagtataaggtaaagaataaatcccaacttcagacaaaaattgagctctaggccaagatgaatctcccggtctcatcatcgtgtcatcatcaaccttgactgctgctttgggcttaannacctcttnngtcttgttcccaaatagccaataatcaccattgtcatttgaagatgcatcagcaatacacatggaaggaggagtccaaccatcaaacaatgcattgtattgatcttctttgctagatctgtgtttctttctcttctttgtatcatctattgccgctattgatgttgacggcagattcttttcaagctcggatgtttttgaacttgagatagaacttgttatgacatcttggtgactgagcgactttgcaactgtagtggagcaaacaacagcctctctaggcagagtaggaacttcctcctttggttttttgaagaccattctaatccgtagaggtttacctgctacaggtgcagctttgatgagactttcaacagccggaggagaatcatctctaatcctcttcttactattctgacttccatcagacaaatatccaaggtgtttttgaggttcctcaagctcatctgtcaaaccactcttctctagtgagtcagactcatctgacactttc

SEQ ID NO: 355 - DNA, 678 bp, Arabidopsis thaliana
tgtagtcataaagggaaagaaaagtgtgtggaatctgagcaagaaggagagagctgatctcgttgacggcgattacctattcactcccgccggtgatgttcaccgagtcaaatatcacgaagacactgagttcttcatcacttgggatggccattgggacatattccttgacgaagacctcgaaactgcaaagaaagccatcgaagaagaagcttgaaggtgtaaactttgtgtagtactctcttcttttgaatgttgtaagttctgagagtaaactttcttaaattgatgtactttgtaagaatctttgatttcaaaagatggtgtaatattacaaatactttctcttatgaacactatataaagggtttctacatatgcttcttcttcatgtacccatagtgtctcaaatcttcatcaattagccattggtaactactttcaaacatttttcatcattagaccagacttagctcatcaggaactgcagttgcagaagaagaaagcttcttgtttagctctgctagttcttcaccagcatcacagatgtatgacgaagcttgtctccctgataatgttgctccttccatactatctatgtaatcctgctttgtgtatgaaccggcgaggaagaaattctttatgggcgtcttctgatcgggtctgaatggatctttt

SEQ ID NO: 356 - DNA, 678 bp, Arabidopsis thaliana
  misc_feature (1)...(678): n = A,T,C or G
ttttttttttttttttttttttttttttttttttagcgaagaaaaagttgtctttctcgattttttttctcaatacaccaaacttacatacgttgcaaagatgaattgaaaaacatttcactcgatttaatatggaatcacacagttagaaatagaaaataggaagaagctaagatacgagtggaaaagaggatatgtttctacataattgtaggcacactttttttctttcgtggctaagtttaaacgttggctgcacttctgaatgaaccgagggacttggagcctgaggcccttagaacgaattggtgataaaatgcagctatcgtagctccaatgaatggtcccacccagaatatccagtggtcatcccatggcttgctcttgttaaagattacggcggctccgaaactcctagccgggttgataccggttccggtgatcggaatagtggccaaatgtaccataaacaccgcaaacccaatcggaagtggcgccaaaaccggaacgtgggagnctctagcgttgcgtttgggatcagtagcggagaagactgtgtagacaagcacgnntgttccgatgatctctgccgcgagtccggtgcctgtattgtagccgtcagctagaaagttggctcctccaccgtaattaacatagtgagagctttgaaatgccttc

SEQ ID NO: 357 - DNA, 678 bp, Arabidopsis thaliana
ccacgcgtccgacaggggaaacgagtgagagcgataatcatattgatatccatcctgccgttaatcacagattgaaggaaggtgaaaccataagaatcaacgtgaagccgaaaccaacaacaaatggcactgggatgctctcagctgctctttcaggaacggggaagccaaaacctctagcacttgccccaccccccaaagctgccggagtaaccaggtctcctttacctcctcctccaaacgatcccgtcgcttcaaggattgcatctgatggctgcaaggaatcacgcaggaacgagcctctatctgatctatctcagctcaagaaaaatcttccttcaacggcgggatcaggatcgagcaagtcaacaggagctgcatcaggttgggcagctttctgatgaatggagtgtaaaatttaagttattggacaagtccggcttcatcttcttgtgacttgagagcacgagacaatagacaacaatggtggtcagccaacagtctttttgatgtatgttaatggtaagttgatgtgtgtttctttgtaatcctcccacactccctgttttaattatttttcttccttataatcatcgttgttacattatcgattatcatttgtatcactgagatattaatatatacaaaaaggctttttcataatttcaaaaaaaaaaa

SEQ ID NO: 358 - DNA, 678 bp, Arabidopsis thaliana
ctttttttttttttttttaactacaaacgattttattatgcaaacagcaagtattacaactcaaaccacataaaacattacataatcaaactttattcccatagttctcttcttaatctatagtgcctcaaaaacttgaggcagttcattacaaacgcaccatggtttacttaaaatcatacatacataatgcaatacatgcatggtggtgattggttaatatattgttttagtgaccgggctgagtctgaacagcttctccggcatacgagcagcatcttgagcagccgttgtaacctctgtagcagcagccgtggcggcagtaacttcccccacttccccctcctccttgtcgcccaccgcctccttggtatcgtcctcctcctccttggtaccgtcctcctcctccttggtatcttcctcctcctccttggtaattacctcctcctccttggtaattacctcctcctccttggtaattaccccctcctccctggtaacctcctccgttattgtaatttcctccattgtcaccgtagccacgttgatcaggtttcacagtttccttactctctgaattcactgtggcagaagatgccgcggctacttctgagacgacgagaagaacagcaaagagacccaacagaaccaaagccttggaagccatttttgcggccg

SEQ ID NO: 359 - DNA, 678 bp, Arabidopsis thaliana
gattacaagtttccaacaatgattcttttagtattacaatttttcacactttactttcatatcgaagctcttttgtgtgtggttgcggttcaaggttcatggctattaacacggctatggagttcgagcatctcctgatagttggggtcgaccgagagcgctgcacgacagtcccgcaacgcactcgtgacatcaccgatatgctcgtggaaagccgctcgtaagtgaagaagatgaagatctgctttaaaggcgatagctcgggataactctgtgatagcctctctctctttccgactatccatcaacactgcggcgcgatatcggtaaggataaacccggagagggtctaaccgggtgaccatttcaagatcagatttggcgagttcacgatcacaatactcagatcttttctcgtaggcggatgcattgttttgagccttttcgattagtctggtcatttcttcgtaggctgcagctttgtcgtttctaaggaaatggacacgagctagaccttggtgtgcacgcgtgtgtcttaccttgagagcgtttatatagcaatccgcagctaaatctagcttctcgcaatcgacatagacactcccgagattgttcagagcctgacctttgcgcaacctatcagaggggcatttaagagcatcttcaagaagtgaaaca

SEQ ID NO: 360 - DNA, 677 bp, Arabidopsis thaliana
agtcgaaacgatggagtttgaggttaagaagttatttgaaaccgtgaatggaatccacgatgagatgttctatctccgcgacagggaagaagaaatgcacaatctgaacatagcgacaaattcgaagatggcatggttgagtttcgtgtcgcttgcagtttgtttatcggtcgcaggtcttcagttttggcacttgaagactttcttccagaaaaagaagcttatctgaaaaccattaccatctcctgagggcagagattgtattgaaaaccctatgactatagctttatatacactactgaactcatttttcattttgttactgaatttttcggaaacagacattttatcctgtctgatatgatatgaacttctcattaacctgcaaactcaatccaatccatgtaacaacaataaaagctttctatctcacactcttttaaagcaaatgaaaagatgaaaaagaaacaatctttacaaaagaaatgaaacagagattaataaggcaaacagagaatgatactttcttgtttctggttgtttttgtgcttaaataatggattttgtgtattatgaagtgaataagccccaatggtgatctgatggtagagtttccttgatcttttcaagtctcttgagaatgtccagaaacgacggtctctggttcatgtctgcgt

SEQ ID NO: 361 - DNA, 677 bp, Arabidopsis thaliana
atcatgacttctattcgaagaaatcagagattaggcatatgatagaatcagaggggattccatatacatacatttgctgcggactgttcatgagagttctacttccatcgcttgtgcaaccggggcttcaatctcctccaacagataaagtcacagtttttggagatggaaacgttaaagctgttttcgtgaatgatgtcgatgttgcagcatttactatcaagacgatagatgatcctcgaacactgaataagaccttgtaccttagcccgcccggaaacatatgttccatgaatgatcttgtcgagctctgggagggcaagattgagaagaagcttgagaaaacgtttgctacagagaatcaacttctcaagaagatcaaagaaactccatatccggataacatggagatggtattcatatactctgtctttatcaaaggagatcacacatacttcgacatcgagtcttgtggtggagtgaatggtactgagctttaccctgatgtcaaatacatgaccgtgagcgagtttcttgatactcttctctagaattataaaccaaacagcaaagggatcactctcatttttcagagtttaccttttacacttccaaaatttctctgtttttgagggctgaatcaatctatctcatgtagcactatctttaccctattg

SEQ ID NO: 362 - DNA, 677 bp, Arabidopsis thaliana
aggaggattcgataaaatggctccaagatccgattcgcaaaccggctccagtgtatcagacggttcagatcaatcctcaatggatccaatattccaccttctccgaatcgtcccattctcatttctccgaccaccgcgcctccgtctgaagattccatcgttcacgcttccttctccgatgactgtatacgctctaattctccttacctactttttagtagtctccggtttcgtctacgacgtaattgtcgagcctccgggtatcggatcaactcaggatccgactactggaactattcgacccgttgtgtttatgtcgggtcgggttaacgggcaatatatcattgaaggtctctcttctggattcatgttcgttctcggtggaattgggattgttatgcttgatttagcgcttgataagaacaaagccaagagtgttaaagcttcttatgctgttgctggtgtctcctccattgtgatcgcttatgtcatgagtatgctctttatccgtattaagattcctggttatctttattagcttttagattatgtgtaatgggaacttgacttataagagtagtgatcacttgaaaagttgtgtcttttttagtgttcgaactcagttccgtagtcaccaatttgaagcatgtctctttggatttgaattaaagtcctag

SEQ ID NO: 363 - DNA, 677 bp, Arabidopsis thaliana
tcgagcggccgcccgggcaggtcagacggaaaggaggagacggaagaaaatgccggtgagagttgttgagagcaacacgcctgctcaagtttcaggaactgatcctgggaatcgatcaccacttccgcctagttcacttctcggcgctggccaggcattttctggtacgcaaaatgtctctaatcaacagaaggaggaagcttggagagttaacgtccagatacagggtattgaccttgaacatggttatctttgtggcaccatggaagctctaaacgttcccatggcagacactcctgtcataacattctgggaaggggaaatagttgatggaaagaattataccttttacaccggaaaatgggaagccactttgtttgtcacaggagggaagatgatatgagacattggtcaaagtttccatctttttcacctcttcagggacaagttgagtctgatggtggcaggcaattggatcttaacaattacccttatatatttatgagatggaaagagcaatactttgtaaacgttggcacagattgtggactaacaatagctggattttactacgtatgcttctcctgcagcgatggttccatcagcggtttctattatgatccaaacagcagtccgtttcagaaactggagctgaaaacagttaacgaaggaagatc

SEQ ID NO: 364 - DNA, 677 bp, Arabidopsis thaliana
cttttttttttttttttttttaagattcttaaccaacttaagtcaaaaaggttaccacaacacgaaatccttactatccagaatcttaaatataagaacttgaaacaaaacaaaatgaaaaaaaactcttcaaccagtgatgttctgagacttgttgaggataactccttcatacttaacttggaaccacttcatggcatcatccttggtaactctatgttggatacctacgcgagtcttgcatctacggcgacgggccacacggtatcctggacgttcaagaacaacgtagaaatccataccgtagataccggtagaaggatcgtacttgattccaagatcaatgtgctcctggataccgaatccaaagcagccagtgtcactgaagttcctcctcaacagctcgtattccttcactttcaaaccactctcaagaagctgcattgccttctcacctctaacagtgacataacacgcaatcttttcattacgcctgataccgaaagacctcacagtgtacctcgccttagagaagacaggggtttgaccactgagctgttccaacaccttggaggcacgagtgagacgatcaccactctcaccaacagagatgttaagaactagcttctggaccttaatatccctcatagggttcgagagcttcttctccgatgcca

SEQ ID NO: 365 - DNA, 677 bp, Arabidopsis thaliana
  misc_feature (1)...(677): n = A,T,C or G
aaggtccacattaaacccacaaaacgcagtcacacaatcatcatcacaagcgacgtttccagctgcaatgcaacgaaagccaccaagttactcaatcagcgacgaagatctcgaatccagaggctttcttctccgtcgaacaacagaaggacttaacttagaccagctgaattcagtctttgcagccgtgggattccctcgtcgtgacacggcgaaaatcgaggtggcgttgcagcacacagacgcgttgctttgggtagagtacgagaaaacgcggaggcctgtagcgtttgcgagagcaaccggtgacggagttttcaatgcgatcatatgggatgttgtggttgatccatcgtttcaaagctgtggacttgggaannnggtgatggagcggttgattgaggatttacaggtgaaagggatttgtaacattgctctgtattcagagcctcgagttctcgggttttatcgcccgcttgggttcgtctctgacccggatgggatcaaaggaatggtttttatacgcaaacagagaaacaagaaataaaaagtttgaaactttataaattttaatttcgtaaatgcacagattacaatgtctctttaactacactttcttgtacaagctaagagagtaatgagaagcacttcttcgtctaaaaaaaaaaaaaaaaaag

SEQ ID NO: 366 - DNA, 677 bp, Arabidopsis thaliana
gcgtccgcagccgcccaatcctccatccaaaaatggcttatttccggcgagcagccaccgcattggttctcattttccagctccacctctttctctccctctcaaatgcacataacataacccgaatcttggccaaagaccctgatttctccactttcaaccactatctctcagcgactcatctcgccgacgagatcaaccgccggcaaacaatcaccgtcttggccgtcgataactcagcaatgtcctccatcctctctaacggatactcactctaccaaatccgcaacattctctctctccacgtcctggtcgattacttcggcaccaagaaacttcaccagatcaccgacggctccacctccactgcctccatgtttcaatccaccggatccgccaccggaacttctggatacatcaacatcaccgatataaaaggcggtaaagtcgcttttggtgtccaagacgacgatagcaagctcacagctcactacgtcaaatccgtctttgaaaagccttacaacatctctgttcttcacatcagccaagtcttaacctcgccggaagcagaagctcccacggcgagtcccagcgacctcatcctcaccacaatcctcgaaaaacaagggtgcaaagctttctccgacatcttgaagtcaaccggcgccgacaaaacg

SEQ ID NO: 367 - DNA, 677 bp, Arabidopsis thaliana
ctttttttttttttttgaaaaggtcacatatatcgtacacaaactgataaggatttatacaaagttgtatcagaagcagaggagacataggcatgatgtgatgatgagtacatgatcatatagttgaggaaataacttattgtatctctctgattatctctcagtttcattttctgatgaattcaacacctttctgaatacttccggctaattcatcttttgctttctccagaccaatcctttcgtattcgtttaagggtccaagctgatacacttcctctgctcctgtacggccaaggcgcacttttgttgcaaagaaagctaattctgtcacctgtgaagcaacaaaagagcattctacgacattcgcatctcctcttaacccgcgaaggcaagcatctgcaaacttggctgcagcatatgccattgaaagtgttgcagaaccagctccagcttttgcctccacaacttcagttccaccattttgaatccggtttgtcaggtactcaatttcttgaggtgtgaagctgctaggaggtttaacctgtgacagtagtggcaagattgtgactccggcgtgtcccccaactactggcacatcgacttctcttggatcaaggccaagaacttctgccacaaatgtgttggcacgagcaacatcgagtgtagtaactcca

SEQ ID NO: 368 - DNA, 677 bp, Arabidopsis thaliana
  misc_feature (1)...(677): n = A,T,C or G
ttttttttgcttaattttttttgcttttattatcattttctctttgcaataatatgaatcnnntatgttgaatgnnnttgnnnattgtttagataaacaaaaaactctcgataggaataataatcatagacaaagtgaatttcttgnnatgcagaaatcaaaagagagattattgagaagttaaattgccgccactttgttgccagagattgatgatgtcagtggcttggttaagaagaatgatcatcttcttctgagagatccatggtttagcttcaagagtagacttaagctcttcccaagcatctttcctaggccagaagaagtaaggactaagtgggattgtgccatgtccaggtacatgttggtccaatcctaatcctatgttcttctccatccacacaaacttgagtaccactcttgatttctcatctggcttcaccacctttgttgtttgttgtggagtgttgtcggaagtatcaattccggtgactgtttcagcggtgagtgtctctggagctgctagagttatgattttccgttttacagagatgggtttggttgtttgggtatggaacaatggaggagaagcagtgatggagagttttggatgttgagagatgaaagaagagcagagggaagtagaagagagtgccattgatgacatcatttttgtg

SEQ ID NO: 369 - DNA, 676 bp, Arabidopsis thaliana
cccgtcctccctctgttgctcctgttactccaacatctggtgcaattagtgacactgaggctactacaataaaaggcgataatttatcatctcggggggcagatgattcaaatgatggagctacagcacaaaacaatgaggctgagaataaggaaatgtctgtgaatggaaaagccaatttgtcacctgctggtgacaaagcaaatgtcgaggaacctatggtatatgctactaagcaggaggccaaagctgctttcaagtctcttttggaatctgtaaatgttcattccgactggacatgggaacagacattgaaagagattgttcacgataaaagatatggtgctttgaggacactcggtgagcggaaacaagcgtttaacgagtatcttggccaaaggaaaaaagtggaagctgaagaaagacgaaggaggcagaagaaagctcgggaagaatttgtcaagatgctagaggagtgtgaagaactttcatcatccctgaaatggagcaaagcaatgagtttgttcgaaaatgatgagcgttttaaagctgttgaccgtcctagggatcgtgaagatctttttgacaattacattgtggaacttgagaggaaggaaagagaaaaggcagcggaggaacatcggcagtatatggcagagtatcggaagtttcttga

SEQ ID NO: 370 - DNA, 676 bp, Arabidopsis thaliana
  misc_feature (1)...(676): n = A,T,C or G
gcggccgcatgaaacctgggaatgggtaaatcttaaagagatatctccgggagatatcatatgggaaggtgaagatcctgggatttctcgtaaaggaggacatcctgggcaaggccgtggaacaaaaaccatggctcgtggtggtcctgcaagcaatgcgggtggtagaggtaggggaagcatgaggatgcagcaacctaagacacagaatggcatcggaaagaaagctttaggcgaaatcgaaattctccacactgagacattgttaaaagaggtggaaaaagtttttgggtcagttaaccccaacccagcagaggtagagaaggcaaagagagtgctgagagatcatgaactagctcttatggatgccatcgcaaagcttgaagaaatatcagatggagaaagcggtaatatttgataggggctttctaaatctcctcagatgatggagccggagcattagagttgcnnaaaggtgttgtagatggtggtggcaaaatgtgaattgatgagggagatttggaaacttgtatggatggcaaaatgtattttgtttaggagggggatttgatgacatttgtgtaccacataactccaaaaactggatttggaaattnnnnnncttaagcattgtaaaatccataagacttgatataaatgtagaataagatttgac

SEQ ID NO: 371 - DNA, 676 bp, Arabidopsis thaliana
  misc_feature (1)...(676): n = A,T,C or G
tccacagctatcactctgctctgtcactttgtcttttactcagagaatcagagacagagagagaaagagagagagagagagcgaggggaagggaaatggagaaggcattaacgaaagtgacgagctttaaagtgggaagttcatggatctctaagaaagctaaagaagagctctcaaacatcaccaatgacctcactacattctccagtacggttgaagagaaagcaaaatggattttcaacaagcttaaaggaaaaccactgaaaagcttaccagacctcctcaaagaatacaacttaccaccaggactcttcccacaaaacataatctgctacgaattcgatgagacgaagaataaactcaccgtcttcttctcttcaccatgtgaagtcacattcaaagatggatcagcgataagatatgcaacgcgtgtgaaagggattttgcttagagggaagctgatgggtgtggaaggaatgaagacaaaagtgttggtgtgggttaaagtcacaacaatctcagtcgagagctccaagtctnnnaannnnnggttcactgctggtgtcaagaaatctcgatctaaggatgtttatgacacacctcatgatgctatcaaagtcattggagagttctaaggatttttttcacaattggttattatcatatttgattcatg

SEQ ID NO: 372 - DNA, 676 bp, Arabidopsis thaliana
  misc_feature (1)...(676): n = A,T,C or G
tttttttttttttttatcaaaacaagacacgtttattatgaagtgtgttaaataatacaaatagattagatgagacacaaatatacaaaggaataagaatctctcacaaaaataataattgaatgaatannnttttgaggagggaaggaagatgtcccaatcccatatatatcatctcaacgcatcatcaaaacaaactcgtcaaagctgagaactccatcgtcattctgatcaaacccacgaatcataaccttacaagcatcaaccgtacacgactcgccgagtcgactcaacgtcctccgtaaactcgccgccgtaataaactcttccccctccataacatacatcccaaacgcttctttcaactccttcctcctttcttcatcactaccatcttccccttccataagcttcaaaaactcctcaaaatctataaacccgtctccgtcaacgtctgatgtcttcaccacttcctccacctcacgtgacgataacgcgccgcctaagagactaacgcagctttgtagctcttcaccggagattttcccgtctgagtttgcatccatatagtcaaaaacggttcttagctcgttaacgtttaacgagctgcttccgctactattactgctcgttcttgattcgtcttcaaggtttcttgacgattctgatctcttcg

SEQ ID NO: 373 - DNA, 676 bp, Arabidopsis thaliana
cgtgatcaagtatctcgtgtcacaaagatgcttggtgatgaatatggaactgcttcaaacattaagagtcgagtcaatcgtcaatctgttttgtctgccattacttctgctcaacaaaggttgaagctttacaacaaggttcctactaatggtcttgttctctataccggcaccattgttaatgatgacggtaaagagaagaaggtgacgtttgatttcgagccctttaggccgattaatgcttccttgtacctttgtgacaacaagttccatactgaggcattgaacgagcttcttgagtctgatgacaagtttggtttcattgttatggatggtaatgggacactgtttggaactttgagtgggaatactagagaggttcttcataagtttactgttgatctcccgaagaagcacggaagaggaggacagtctgcacttcgttttgcccgtcttaggatggagaagagacacaattatgttaggaaaaccgctgagcttgctacacagttttacatcaatccagctacgagtcagcctaatgtctctggtcttatacttgctggttcagcggattttaagaccgagctaagtcaatcagaactgtttgatcctcgtcttcaagctaagatattgaatgtggttgatgtttcttacggaggagagaatggtttca

SEQ ID NO: 374 - DNA, 676 bp, Arabidopsis thaliana
ttgatcggagactccggtgtcggcaagtctaatctcctctctagattcactcgcaacgagttctgcttagaatccaaatccaccattggtgtcgaattcgctactcgtactctccaagtggaaggaaggactgtgaaagctcagatatgggacacggctgggcaagaacgatacagagccataactagcgcctattacagaggtgcacttggagctcttttggtctatgatgtcaccaagccaacaacgtttgagaatgtaagcaggtggttaaaagaactaagagaccatgcagattccaatatagtgatcatgttgattgggaacaagacagatctgaagcatctcagagcagttgccacagaggatgctcagagctatgcagagaaagaaggcttatctttcatcgagacatcggctctcgaggcattaaacgtagaaaaggcttttcagacgattctctcggaggtttataggatcatcagcaagaagtcgatatcttcagaccagacaactgcaaatgccaacatcaaggaaggccaaacaattgatgtggctgctacttctgaatcaaacgctaagaagccttgttgctcatcgtcttgaaaggctttgtttgtgttgcacttaaaaaaagccaaatatctatgagactttatttcaaggcttgcgttgt

SEQ ID NO: 375 - DNA, 675 bp, Arabidopsis thaliana
tttttcaatagaaactgcacattagattatatatagttaggctaagtcgcagcaatgatggttttgctacaataacatatacgttaacagagagaaacaagagttttttttactcttctttaacgaagccttttcattgaatttaggcataatctatcaaacacatccaaaattcaaggcgaggtcgactaatatctgctatcttcaagcaggtcaagcatcatctggaatactctgagcttaaccttggccgtcgagattcccttgaccggaacttccaccactaccataagagacatcatctcccgtccccgtcgaagtctgccaaacactctgccacgcctgagacggaggctggacataaacaccattcggatccatagctggtctcccaatcatcatccctccaggaccagctggttgtcccatcggcggataatagtaaggcacgccgctcgcggtaggagccaccaccattccaccaccgaggactgcggcttcgtccttaatctcatctctaggaacaatatcaacaaggaaatcgaagatatcagtcctagtaatcgcagcagcgatatcgtttttctgaagcgtacgacgtttattctcctcagcgtgaagccaagatctgatcgtgagctcgagaatgaaaagctcacaagctttcgcgaagag

SEQ ID NO: 376 - DNA, 675 bp, Arabidopsis thaliana
tttatgaaacaaacaagtttattagagtttctggaatcaactacatgttctgagagaaaagtagcagaaatcacagacatagaagagctagatacgaaaggaaaaaaggtttacatgatagttattgaaccaactacatagaggagttatgagtaaaaagctcataagcaactacataaatggtttataagttaaacagcgaaaattgagaactcgaatgagttaaagggtagtaccatcttcagcttcaggtgatcacttgagagaagcagcataagcaacagaagcagccatgaggagagaagtaacagatgaaacaagggtccaaaagctcttcttcttatgtgcatcttccacagaatgcttcattttcgccagttccttcttcatttcctcgaccatgctttctttgtttttgaacgctttcttgatagcttctagctgcacagagtaggaatccattcctttcccacgcttcttctcatcttttttgttttctattccacatactagagaggacacactcttcagcattgttagactttgttttgcattggttccagcagattctagctctgttttcaaaacacccgtagcacttttcagctctacgatatccttttgaaggatagccttttcgtttctcaatgactcagatcgattctccaattcttt

SEQ ID NO: 377 - DNA, 675 bp, Arabidopsis thaliana
  misc_feature (1)...(675): n = A,T,C or G
tttgttccatttcctctcaggtatgcctgtgagtttctagctcaagtgtttgccatacacgtcaataaggaggtggaactcgataaccagatggtggagaagaacattttgcgcacgcagacactcttgtgcgatatgctgatgcgtgatgctccactgggtattgtgtcgcaaagccccaacataatggaccttgtgaaatgtgatggagcagctctcttgtataaagacaagatatggaaactgggaacaactccaagtgagttccacctgcaggagatagcttcatggttgtgtgaataccacatggattcaacgggtttgagcactgatagtttgcatgacgccgggtttcctagggctctatctctcggggattcggtatgtgggatggcagctgtgaggatatcatcgaaagacatgattttctggttccgttctcataccgctggtgaagtgagatggggaggtgcgaagcatgatccagatgatagggatgatgcaaggagaatgcacccaaggtcatcgttcaaggctttccttgaagtggtcaagacaaggagtttaccttggaaggactatgagatggatgtcatacactccttgcaacttatttnnaggaatgctttcaaggatagtgaaactactgatgtgaatacaaaggtcatttactcg

SEQ ID NO: 378 - DNA, 675 bp, Arabidopsis thaliana
  misc_feature (1)...(675): n = A,T,C or G
ttagctttttccgattccaaatctttttgcttatttagtcttcttcaagaactcgatttctttcgcgtttatgtcgacgacgatgaagagacagggctgnagctcagattccggtgatctacggtggcagcccnnncgcctactaaaacgacccccggcgttaaaaatcgttcnnnnnnactccggcggcgaataactggaatacggctatacctctcctctcgccgttagctctttctcccgaatcatcaccggttgaccaaccaccggttgagaaaaatcagtcgacggcggtggcggttgagaaaaccccggttttcaagaaatggcaacntcccgcggcgccgttttattacgagtcatcgacgtttgttccaccgtttgttccggtttagtattggtttagagatccaacggttcaaaagtacagtttgtttgttttttgattctatgtagatctaacggcccagaaaacgcgttttgtgcgtttctactattttgtggttggaacaaactcgattttcgtaaagaatttaataaatcaaaagattattaaattaataagcatgtttctgttactgtttttatatggtccgaaatgtaaaagctaaagtccaatttagttattgtggatgtttatgtatatagtgtaacgttgtgaaatgtgtgaacaca

SEQ ID NO: 379 - DNA, 675 bp, Arabidopsis thaliana
  misc_feature (1)...(675): n = A,T,C or G
tcgagcggccgcccgggcaggtcgaatcgaaacgaagaagatcgagatcagtgaagaagaagaagacgaaatcacgaaaccatgttcttgttcgattggttctacggaatcttagcttcgttagggttatggcaaaaagaagcaaagatcttgtttctcggtctcgataatgctggcaaaactacattacttcacatgctcaaagacgagagattagttcagcatcagccgacgcaacatccaacgtctgaagaacttagcattggaaaaatcaagttcagggcttttgatttgggtggtcatcagattgctcgtagggtttggaaagattactatgccaaggttgatgctgttgtctaccttgtggatgcttatgacaaagaaagatttgcagagtcaaannnannnnntgatgctcttctctcggatgaagcccttgcaactgtcccgtttctgattcttgggaacaagattgatatcccttatgcagcttctgaagacgaactgaggtnncacttgggtctcactaacttcaccaccggtaagggcaaagtgacgctcggagactctggtgttcgcccacttgaggtcttcatgtgcagcattgtccgtaaaatgggttatggcgagggattcaaatggctctctcagtacatcaactaaagacagacgtca

SEQ ID NO: 380 - DNA, 675 bp, Arabidopsis thaliana
gaagctgaaccggagactaccgatatcgaagctgtggtggtttccgatgtttcggaggttactgaggaaaaagctaaacgagaagagattttcgctgttattatggttggtggacgccaatacatagtgtttccagggagatatctctacactcagaggctaaaagatgcaaatgttgatgaccagattgttctcaacaaagtgttgcttgttggaacaaagacacacacttacattggcaagccggttgtgaccaatgccactgtacatgctgtcgtggaaagtcaaggtttgaatgataaagtggtagtcttcaagtacaagcctaagaagaagtaccgtagaaatatcggtcacagacagccgaatacgaggattaggattaccggaatcacagggtatgaagagtatccagcctcgcccaatgttgcagttggagaagtaaatctttgacacaaaatgtttcttgaatgttaaaatttttctgatcttctctatgtaattgtaaggaccctggtcatttcatttctgctgagattccttttattaatatgtaccttcttttgccattctttgatcacaaattctaagttagtgtaagaaaacttcattattgctcatccatcaatctacgcatactaatgaattttatagaataaaacaacttctaccaaa

SEQ ID NO: 381 - DNA, 675 bp, Arabidopsis thaliana
taacttcaggtgcaagtcatggagagtatgtgatcagattaagcccatctctcacggaaagaaaaaagtttagcaacgccgtggaatctgcattgcgacgttctatggttagaatatggctatggggagacgagtcaggagcttcgccggagcttgtggccggcatggtggagtatttggccgtggagagccgaaaacgacgtcactttgaaaagtttggtgggaattggaaggataaggaaaagtctgtgtatgtggttagcttgttggattactgtgaacgacgtagcgagggtttcatccgacggttgaaccatgggatgagacttaggtgggatgatcggacggtggatcttgcttcgagtggtgcgtgtggttcacgcaaggatgtgttgcgtgagcttaagatggacgacagtggattgataattgagagacgaacatgatatgttctcgtgctgccatattgtagcacacatggctccacgtcattatttcaatgtgtataattcatcttctatattcttatcgaaaaatgtttttttttttttttttgtcgttcgaaaaatgatttaattttttctcagataaataaaagaaattatctgaaatttctttgttgttagtctcagaaaaagaaattattggagcccagttttggtgagtggaaacttt

SEQ ID NO: 382 - DNA, 675 bp, Arabidopsis thaliana
taatatatttcttctctaataattgaaagcaaaagaaaacagtttttttttttagaaaggtaaagaaatggaggaaacaaaggagagaaagatagtagtagcagtagacgaaagcgaagagagcatggaagctctgtcatggagtcttgacaatctttttccatatggttccaataatacactcatcctcctctacgtcaagccccctcttcccgtttactcttccctcgatgccgcagggtttatagtgacaggagacccggttgcagctttgaagaagtatgaatacgagctcgtggaatcggtcatggctcggtctcgaaccgtgtaccaagattatgagtctgatattaatatagagagacgagttggaagaggagatgctaaggaagttatatgcaacgcagttcagaaacttagagttgatatgttagtaatgggcactcatgactatggcttcttcaaaagggctttgctagggagtgtgagcgagtattgcgccaaacgagtcaagtgtcctgtggttatcgtcaagaagcaagctcaagataattaagctcatatgattgcattgtgtatatgtttcgaaagaactggtgtaacacttgaatcaatcttcgtatgcgataataaaatacataacggtttaaacaaaaaaaaaaaaaaaaaaaaaaa

SEQ ID NO: 383 - DNA, 675 bp, Arabidopsis thaliana
ttttttttttttttttacaaaactcaacaaagtacaataaatttaggataagagagagttgatgcctttgtcttccgctggcacatgggttacataacatcagaattcgtaatgatacacgacacccatttcccattaagcaaaaaaataaatagaaagattaaataaatataataaatctccatcgaataaaaaaagaagaagaaccaaaaaaagaaatatacaaagggttggtggccgaaacttttgtgaggaggaggacatgaaatggtggtggtggtggtggtggttgcaagcaagcaaggtggtagtagcagatatagttacaaggggattcaaatgagccattgttgttgtgttttctttttcttacggtgcagttccccaagttgttgttggtgttttactactccactctgttcttcctctcaccacttccgctccatcctggagtcggagcaaatgctgacattccacatcccccgctgttgccaggttaccgatatcgcaacccgtaactgcagtgagggactgaagcacactgtctctcccgcattccctccgatactccagagtcatgcttttcagcttctgcctctccattattcccactggagcactctccaggatccacccaatgtactttacattattcacatgctggttaacatctag

SEQ ID NO: 384 - DNA, 674 bp, Arabidopsis thaliana
  misc_feature (1)...(674): n = A,T,C or G
ggagctctttggggatgtggtcatgacgctggtcagctcatctttggtttattgtttctgcttctaaaagataggctccacattgaagttataagaacttggggtacaagagttgttggtttgactctccttgtgattggtgctatgggaatcaaagaagcttctgagatgccggaaccatgtgttgttacttggagaatggggaaacagatgagaaaagcttaaagaagaaaaagatagggtttgcgacatttgcgactgggattgttcatggcctgcaaccggatgctctgatgatggtattgcctgcattggctcttccttctcggatagccggtgcttcgtttctcatcatgttcttgattgggacggtgattgcgatgggaagctacacagtttttattgggtcgtgtagcgaagcgttgaaagagaaagttcctaggatcactgagaaactaacgtgggcatcttctcttgtggccattggacttggattggcaattattgtcagccagttctttggattcagcctgtattgaagaaaacatcgtcaagtctttgtagctctctctgtaggataagantntttgcatgtaccaacaaaatttgtatctttgcttcagaatctttttcttcaatcaaatacaagtttgagtttggctcccccaaaaaaa

SEQ ID NO: 385 - DNA, 674 bp, Arabidopsis thaliana
tttttttttttttttttttttttagcaaaagtatgcttatttatttaacattaaagcaaaagcatcaaccatcatcaaaatccaacaagatagtgaaagatccaaccgccacttgcaactacactacacaactctgaaatacaaaaacttgcaaaacacagcccaaaacagaaactaacacacattgcttaggtgggaagacagttttttgtacaaaagaaaaacattccccgtcactttatccactctgataaagtacacaaaaacaatataaaaaaaacaaagtaaggtggcggaagatcaggtcaccatatttacatcacccgcatgtcacactccatcggaccatccctaacggtgctgactccttgagtcaccgctgtacaaccatatgcacaaaaaggaaggttgatttggtcaaatcagaataaaactattcacttaatccacgcgcccactaaacacagtgccacatgttccttcctttgagcttcattatcaacgcagtcgtagacggagggagaatttggatgggtgggtttatcaaagatgttggagccgatggctctagtggcgaggttgcttcccggattaaagacgctcctccacacgttatccttacgtggcgtcgtcggagtggttggagtcgttggagttccagggctcactgccgc

SEQ ID NO: 386 - DNA, 674 bp, Arabidopsis thaliana
  misc_feature (1)...(674): n = A,T,C or G
gaatggttacttaaagaaccctgaagcaaccaaggaagcttttaaaggaggttggttttggagtggcgacttaggtgttaaacaccctgacggatacatagagctgaaagacagatcgaaagacattataatctctggaggagaaaacattagctcgattgaagtcgagtctactctgttcactcacccttgtgttcttgaagcagctgtagttgcgaggcctgatgagtattggggtgagactgcttgtgcatttgtgaaacttaaagacgggtctaaggccagtgcggaggagcttattagctattgcagggaccggcttccacattatatggctccgaggagtattgtgtttgaggatcttcctaaaacatcgactggaaaagtccagaagtttgttctgaggaccaaggctaaggctttggtaagcttatcaaagaaaggcagaagcaagttatgaattggtaagctttctttgttacttccaatctctacaagatgtcttataaattactgtctataagatcatgtttgtgtctaagctaaaccagaatgagatactaaaaccaatttgtatgtttctgaaataaataaaaccgggatgaaattgtaannccggaagattagatctatagcattctgattagagttgaatctgatggcaagtggatata

SEQ ID NO: 387 - DNA, 674 bp, Arabidopsis thaliana
  misc_feature (1)...(674): n = A,T,C or G
gagcggccgcccgggcaggtggcgtctcatcaagaacagagttacaaaactggtgaaaccagaggcaaggctcaggagaaaactggggaagctatgggnnnatgggggacaaaacacaagcagctaaggacaaaactcaagagacagcccagtcagcccaacaaaaggctcatgaaacagctcagtcagctaaagacaagacgtctcaagctgcacaaacgactcaagagagagctcaagagtccaaagacaagacaggaagctacatgtcggaaactggagaagcaatcaagaacaaggcacacgatgcagctgaatataccaaagagactgcagaagcaggtaaggagaagaccagtgggatcttgggccagaccggtgagcaggtgaaacagatggctatgggagctactgatgcggtgaagcacactttagggcttcgcactgatgaaggaaacaaagaacatgtttcttcagctccaagtactactactacgaccactactcgtgagacacagaggaagtgaagaggataaatatttgtttcgtgttcgtggttttcatgtttgtttgctttgattagtgtttgttgcgttcgtgannttatgccgatccttgttgttgtttattgggtttgaatgtacttctacgtattatcatgtaatggttttctt

SEQ ID NO: 388 - DNA, 674 bp, Arabidopsis thaliana
aggtcaaacactttcatttgtctcctttcgtcaactccacagaggtctcctcatggctccaattgctgtcggcgatgtcgtaccagacggaactatctccttcttcgatgagaatgatcaacttcagaccgcctccgttcactctctcgccgccggtaaaaaagtcattctctttggtgttcctggtgctttcactcccacttgcagcatgaagcatgttcctgggttcattgagaaagcagaggagctgaagtcaaagggtgttgatgacatcatttgctttagcgtgaacgatccgtttgtgatgaaagcatgggggaaaacatacccagagaacaaacatgtgaagtttgtagctgatgggtctggagaatacacacaccttctcggacttgagcttgaccttaaagacaagggtcttggtgttaggtcaaggagatttgctctgttacttgatgatctcaaagtgactgtagccaatgtcgaatctggtggcgaattcacagtttccagcgccgatgatatcctcaaggctctctaagaaatgtaccacttgtgttgtctatgtaaaccgctgtatgtgtagtagaggattctatagcttgttctcagacattaaccaaggttgtaataaagcggtttcattgtgacttgtttggcataaaaaaaaaaaa

SEQ ID NO: 389 - DNA, 674 bp, Arabidopsis thaliana
ctttttttttttttttttttttttgttttatctgtccacttttttattcaaataaaagaaaagcagattacattggatgattttatacagtcggttctttaacaaagaaagatgattgatgctaatatacacaattacataatcttatacttgaattatacagtagtttggaagaaagaattatacagtagaaaaatattaccgtgaaaaaagtaaaaagtaaaagtaaaaccatcattattagttggtactctccacttcatctctaaaccaatctgaagtaccccaatcaaacggcgtggacttttcctccggtaagaaccggttccgacaaatcgggcacgttatcttattacagtcaacgatccaacggtctaaacaacgatgatgaaacacgtgtccacacttcggtagctgtctaatcttatcgtcggatacaaaatcggataagcaaaccgtgcagcaatcttccggatcggtcaagagatcggagaaacgaaccaccgggattaactcgttggcaagagttgctgacgtggagagagcgagtcgggtcgggtcgggtcgagaggtctcgttgtggtcaagaaaacttggtagaccgatgtaaggacaaagagcatcgaccatgtctctaaagaaaccgatgacgtaaagtgtttttagtacgtaac

SEQ ID NO: 390 - DNA, 674 bp, Arabidopsis thaliana
cttttttttttttttttttaaaaagctgaagtaaacaacgttgtataacactaatcacttggtggagagaacaaaaatggttcaaaaattacaaattcctaagttcttcatttaagagaagcacacacgacagtgcccaaattttatgttcctctatgctgctttcgtaggtggagacatattattgacaagggaccctgtaacgatgatcgctaatatctgcaccaccgctcctaattgagcacaaatgaaacctgcgagctcaagcttcgcggttgttccagagctattgcgttcctccatggttaatctgctcctaacagcacaaaacacagaaagaaccataacaatggttgatgcagccgtgtagagcctcaaaaggtttactctgctacgtctgcaacctaattctcctatcaatgaacacactaagccagcaacagcagctgcaatagcaagggtgttcttctcatcctttttagttgttgttagaaacgcacacgataatccgattacataaatcgcagcctgaacaaagatcaaaggacggagacgagctttttctttagtgaccttcgtgtaacgagagtcaacgaccatgcggtatgagaaatcggatccatcggtaccactgggtctacccgccgtcggcttcctctgctgcatcttcgccg

SEQ ID NO: 391 - DNA, 674 bp, Arabidopsis thaliana
  misc_feature (1)...(674): n = A,T,C or G
ttctcttatcaagtgctaccgattctcacggtctttagaaatgaaccacttntnntgatttctcgcaatggtttatcggtatatctaaccgtgttataaacccatgcacccgcaatcgcaccaagagttggtgcaactaggtagatccaaattcctttgtagcaaccatacaccagtgcaggtcctaaacttcttcctggattcatcgacgcactcgataccggtgcggcaattagcacgttaagtagcaccgttgatcctattgctaatccagcaagttctccgatcgctctattatcggtagcaacgccagaaatgatgaacattagatagaaagtgacgataaactccatcgtaaacgcctgaagatctgatcccactggtgatgatccgataaacacatcatgtttcccgctacaaacgtcgtgatcaagtccgaacaacaaccgtaatgtcgcagccgcgagcgttgatccgatcacttgtgatatgacataagctggaacctgtttgagagggaaacggccgcaagaggcgaaggcaatggtaacggcaggattgatatgagcaccagagntgtgaccaagagagtaaatgaggaccatgatggtgagtccccaaacgatagcgatccctggaagagtcacgacattgtcgttttgcatgtttacaac

SEQ ID NO: 392 - DNA, 673 bp, Arabidopsis thaliana
agagacactaaaggataaagctgaagattgcaaagaggtgtctaaaggccagactgaagttatattgatgacagaagaaaatgcaaaggttccatttaaccgtacacgaaaaccctgcaaacaagaagagtcaggctctaccatttcatggactatcatcaaatgcaagaaacccgttgcagagaccgaggatttaagagaatttaatccaagagaaccaaattaccttccagctgtaatggatgaggatgctgaaaaagtggacctcaagcatcaagacatagatgagaggagaaattcagaggattggatgtttgattatgctctgcagcgtgctgttagcaaacttgccccagcaaggaagaggaaagttgcattactcgtagaggcatttgaaaccgtgcaaccacatggtagagaacctgaacaggttttaagttatggaagacaccttcaagcctgcaattaacgaaggtccagggatgatccaaggaagccaactaaaggaaagatgagtgacctttgtttatttacttacaagaatcaaacccaagtgtaaactttgatggtttatttcctagttctttgtgtggtatttatgctcttcaatgtattaatgactctgtgtgtgcttttgcttgtggactaatttctgggacaatcaaaaaaaaaa

SEQ ID NO: 393 - DNA, 673 bp, Arabidopsis thaliana
gaattacaaaacctcttacaaaagttataaagacaaatcatacaactacatatattttagtacactcttgacatgacaaatagtatttgaatacgatcacaatgccgaatcaagccagctgcaataactcttcacgtttaatgtcgaacaccttcaccaaagcatcttccacgaccttatccggggttgatgcacctgatgtcacaccgattgttattggtccctttgggagaaagttttccttctcgaccagttctccatagtggagcttataggctattttattcccaggtcctatccgtttctcactatcgatccagtaagatgggattccccgtgcctctgagatttcctgaaggtgagaggtgttacttgaattccatccgccaaccactagcatgaggtcaatcttctcttccactagctcatagattgcgtcttgtcgctcttgagtagcgtcgcatattgtgttgaagctgatgaaatgtccgcttacattttccactccatacttgcgcatcattgttgtctcgagtaatcttcctatctcctctgtttctccctttagcatcgttgtttggtttgcaataccaactttgacaaggtcattgtcgggatcgaaacccttcgaaattgcgtatttgaatttctccatgaactcctcgtttgtgat

SEQ ID NO: 394 - DNA, 673 bp, Arabidopsis thaliana
tttttttttttttacagaaaaatgagacaaggatatattaagcttcaaatagatgacccatacaaaatgttttaattgcccaacctaaacacatactgagttgaagtaccatatgttttttcaaataggccacacgagcagcaattctagtcagacataataaactaagacacatgagcgttgcagcaacctgaaagcaaaatgttaaagaaaaggagaggttgcagaataagacctctctaagacaaatgtactctgcaatccaaagtggcaatttcacgtttgtttcatgtcaccgttttctttaagggtcttcagtcttctgtaccccttgtcagtaccaaagatccagtccatatacacaaaagttgaagagtagtttccggactttgtgtatagcagtcggtgatggtagtcatggaagtcagcacctccatacagaggaagaaaatttgagaggctccatgggaaatgataaccacaatgtgcctcaactgtctccagcactctcaacaccatccataaccagagagtaattaggtgagggccagtaagagctggaccgactatggtagcaaaacccagaaatagaatctcagcggggtgagcatattctgatgtcaaaccaaatggtgtggcatattcatgatgcacactatgcacgttcttgtac

SEQ ID NO: 395 - DNA, 673 bp, Arabidopsis thaliana
  misc_feature (1)...(673): n = A,T,C or G
tttttttttttttggtaaacaaaggatatttctcatttacggtgaaaacgtataagccacatttcccagtattctcgatcaactccaaatggaagatgataagtggtaacaacaagggctttgagaaaagaaaagaaaaccgaaaagaaaaaataaatcagaaatgcccgaaccagtatgtgtgtgtgtcttccaagtcttgttcagtcatatagaccttcttgttcccaaatgtccactagaaaatccaccatttcggtgagaggaatgggttggggaaataacttgttgctccccagcaagctatcatacgttgctgtgttccaatttaacttggctccttgattgtgatccaccgggttgttgggtttatcctttcccacccaacgctcccgtgtctgattccaaagaagaagaccttgatttacatattcaggaggagcattagagtttctagcagcagattgagaatcaaaagtctgattggatgatgataagctcccctgtgaanggaaggtgatgttgtccatatcaactgtnnttgttnaccagaaatcttcagagacactcggtttcttacacggtcgagcaatggaattggaaggtggatccttcagactggcggcagttgatctgtgttctctgtagcaacccacgcagccactgctcctca

SEQ ID NO: 396 - DNA, 673 bp, Arabidopsis thaliana
ccacgcgtccgcaaaatacttttaaaatcacacacactaatattttaactctccccactctttgccttgcccttggctctagaaccgaacgtgactctccagatagacttttggagtcacaacattgagtttgaagaggagggaagaagtgagctagggattggttcagagtgaacataaatggctctcaaggcattagactacgatactctgaatgaaaacgtcaagaagtgtcagtatgccgtaagaggtgaactttatctccgagcttctgagctgcagaaagaaggcaaaaagattattttcacaaacgttgggaaccctcatgctttaggacagaagccattgacatttcctcgccaggtggttgcgctttgccaagctccgtttctactagatgacccaaatgttggaatgctatttccagctgatgctattgcaagagctaaacattatctttccttgacttcaggcggtttaggtgcttacagtgattcaagaggccttccaggagttaggaaagaggttgctgagttcattcaacggcgtgatgggtatccaagtgacccagaactcatctttctcactgatggagctagcaaaggtgtgatgcaaatcttgaattgtgttatacgcggtaatggagatgggattctagttccggttccacagt

SEQ ID NO: 397 - DNA, 673 bp, Arabidopsis thaliana
gtaaacgctatgactcctctaagccttaatcctctctatgcgtattgtacttgatatgtattttacaaaattagaaaaattgtgatagatgttatcctcaatatatgtaccatgtaaacgtattatggtgtaagcctgcaaagctcatatcgagtaggagttttaagaacaatgactaacaataacaaaaagaaaaaagagttttggaagagttatggcaatacacaagagttctcttccctctactgtaatgacttttaaagagagatttgtgaagacaaaacaaaagatgagtcatgatggggttggttttcggtaaatgtttgtgttgttgtgcaactccaactacacagtgtagtgatgtcctgctgtatcaatgtccaatccctttagctttgcgactgattccacatgtcccttcaatgtgtgaagctccctaagcctagctatctcggcccttctcttggcttgctctgcgatctcagacagctctctgtaacttcctttctctgggaagatattaacatcttcttttggctgcagaccgtgcaatgtcctttgagcttgtgcccattgagcttctctttctccaataccgtaatctttcttggttgtgaaagcggtcctgttgtcaaacaagctggcccaagcctttccactcaagatataccga

SEQ ID NO: 398 - DNA, 672 bp, Arabidopsis thaliana
gaataaaatcagatgcccaaaaaagagagcaaaatatgagttcatacttcacataacactaaaaggcttaaccaaacaaacaagggaaataagcaaaatgatgtcctaaagaacgcaaccagaatcaagtcataatgtaacttcactgtagaaatcataaatcttgtttctttttgtgggcttaagataaaattctctcacttagccatcatgactttgacgaattcttcatagttaatctgaccatcgccatcaacatccgcttctcggatcatctcatcaacttcctcatcggatagcttctcaccgagatttgtcatgacatgtcgaagctctgctgcagatatgaaaccattctggtctttatcaaaaaccctaaaagcttccttgagctcttcctctgaatcagtgtccttcattttccttgccatcaggttcaggaactccgggaaatcaatggtcccgttcccatctgcatcaacttcattgatcatgtcttgaagctcagcttctgttgggttttgccccagagacctcatcacggttccgagctccttggtggtgatacaaccatcaccatccttatcgaagaggctaaaggcttccttgaactctgagatctggtcatcggtgagctgatccgccattttccttcttacctttttttagaaa

SEQ ID NO: 399 - DNA, 672 bp, Arabidopsis thaliana
tatcgaaaattctgaatctgaaaggtttgagtgaagatgtcttcagatcggaaggttctaagttttgaagaagtttcaaagcacaacaaaactaaggattgttggcttattatttccggcaaggtgtatgatgtgactccattcatggatgatcatcctggaggcgatgaagtcttgttgtcctcaacagggaaagatgctacaaatgattttgaagacgttggtcacagcgacactgcaagggacatgatggacaaatatttcattggtgagattgattcgtctagtgttccagcaactaggacatacgttgcaccacagcaaccagcctacaaccaagacaagacaccagaattcattatcaagattcttcagttccttgttccgatcttgatcttgggattggctcttgtcgtccgtcactataccaagaaagactagaagaagccaaaggcttgctttgatgcttgtcattgaatatctctaccgatctctgtctatctctcttgcgaaaaaaagtactgttactgttgtttggtcttagactgattcttgttgaaattacgaaccaaaaatcattgtgttgctactagttttactgtgttgagtttatgatgacagtgttttcgactttgatgatataataaaagactgcttgatttgccgcggccg

SEQ ID NO: 400 - DNA, 672 bp, Arabidopsis thaliana
  misc_feature (1)...(672): n = A,T,C or G
gcgtccgaatgaattgggcaaaattccgtgaaactgggagcccagaagacaccgacatgtcttctactccgatctcgtccgacacgacggcggtgtccaaagtgatcgatccaaattacgtattaatggttgctgatttcttcaaagctatttccccagacgaatcttgcaacgatttcacctctttcgactctttctccgtcttatttcaaaacaataccagagctctctccatcgcacgcggccgtgtctcgtgctccgtcaccgtcacgccaggcatatccaatttctttaaggggttacatggaggagcggtggcatcaattgcagagagagtagcgatggcttgtgtgaaaactgttgtgtctgaagacaaacatctgttcattggtgaattgagtatgtcttatctctcttctgctcctatttcgagtgaattgttggtggagggaacggtggtgaggactgggaggaatctgtcggtggtgactgttgagttcaagatcaaggagaccatgaaagtcacttacctatctcgtgctacttnttaccattctcccatctctaagctttaaagctnnttcacatgctcagtgatcttttgctgatctatttacattcttctgttcaataaaacaagattctgtatacagatattactgtctttaaaaa

SEQ ID NO: 401 - DNA, 672 bp, Arabidopsis thaliana
  misc_feature (1)...(672): n = A,T,C or G
tttttttctagtaacaccaaatattagcttggaaacttcaacaaacaagacacaacactgtaattatctcaacgccatggaccttcttcacggcctggttctttattaatacaatagtaaagtaatggttgctactacttggtatctattttcatatcataacttattttcactttgatactttttgaaaaagaggagtttatgtttactgattccctgaaatgggagcatcacggcctctcttgaaatcgtcccatcctctgacccagggctgtccagccgctgcacgagtctctggcgctgcatgcttgttcagattcttcatgactttctcgtgtaacgccgagaacaccggatttgaactcactgcttccggaggctgttcctgttcagttagccatttccagagatcagggttttccaaattgaggacatgaattagggatttaacaccattttcgtccatggaattaacattctcctcannccaattccccaaaacaagatcaagttccaaaaaccctctttgnnngctcctatacaacaatctgttgatcgttcttctcttattctcttcgttagagagatcaatatcgaaattctgggcagacgcagtgttctcacagaagaatctcgcccccaaatcaactccattccggaatataataggat

SEQ ID NO: 402 - DNA, 672 bp, Arabidopsis thaliana
agaaaacatgaaaatggaaatgggtttagtgttccttacagtttttatggctgtgatgtcttctacaatggtctctgctcagtcaagctgcacaaacgcgttgattagcatgtcgccgtgtctcaactacataactggaaactctacctctcctaatcagcaatgctgtaatcagttgagtagagtagtccagtcttctcctgactgtttgtgtcaagtccttaacggtggaggctctcagcttgggatcaatgttaaccaaacacaagctcttggtctgcctagggcttgtaatgttcagactcctcctgtcagtcgctgtaataccggtggtggtggtggtggttctacttctgactctcctgcagaatcaccaaactcttcaggaccaggtaatggatcgaaaaccgtaccagtaggagaaggagacggacccccatcgtctgatggaagctctatcaagttctcatttcctcttattgccttcttctccgcggtttcctacatggcaatcttctgagttactattttcccatacgcttttgtgccactcagattgcattctttatttgtccctatttattcacatttcgttgtgattttgtgtgatgtattttatgctctgtaaatccctactctccgggtgatattgctttgttgtaccaacggaga

SEQ ID NO: 403 - DNA, 672 bp, Arabidopsis thaliana
  misc_feature (1)...(672): n = A,T,C or G
agaaacttaaccagagactcttcgctcttcgatcagttgttcccaatatcactaagatggataaagcctcaataatcaaagatgctattagttacatagaaggattacaatatgaagaaaagaagctcgaagctgagatcagagaacttgaatctacaccaaagagtagccttagtttcagcaaagattttgatcgtgatttacttgttcctgtcacatccaagaagatgaagcagcttgattctggttcttccacttctctcatcgaagttctcgaattgaaggtaacattcatgggagagaggacaatggtggtgagtgtaacatgtaataagaggacagatacaatggtgaaactgtgtgaagtctttgagtcattgaatctcaaaatcctcacttccaatctcacctctttctctggcatgatcttccacactgtctttattgaggcggatgaagaagaacaagaggtgttgcggttaaaaatagaaacaggaataggagcttataatgaaactcaaagccctactttgagcatcgactctctttactaataatactttttttcttccttntttggttcattttggcttctctctttacaataatgtatgtctctcttttcatttttatgatctcctacgtttgtttgtccaaaaaaaaaaaaaaaaa

SEQ ID NO: 404 - DNA, 672 bp, Arabidopsis thaliana
ttttttttaaaaaaaataaatttggttagattatagattaaccggaacaaaacaataacaaaatcaaaacccaaacgaatcccatgtataaaaaaaattacagaaattagcgtataaattattattctttttataagacacttattagactcaaaaagaaggttcaggatgaacagcagaagcagctgcgttattaacgtgaagagctctttgaagtttccggtgatcgaacacttcaactccaacgttaaaaatcgaagtcaccggccggtgatcggacattcttatctccgatctcttataacattcttgtcttattccttttcataaccataatatcctatcacaccaagcaggagctctcttcttctccccttctctcaagttttctccggcgtaacgatcagaatcgaattcgtatttataggttggagggaatttaatcggtccttctctccatccatcaaaaacatgccctcttcttaattctctaatcaactgatcactgttcttgagctcatcccatcgtttttgtgagacaagctttcttacttcaccgtctgacatattaagtcggtagttcaaatctccgaaccaaaatacttgatcgtgacatggaatcgtccttggttgatcagtgtcaagaaccgatgcaaaacgagtcctacgtat

SEQ ID NO: 405 - DNA, 672 bp, Arabidopsis thaliana
ctttttttttttttttttttttttacttcaaggaaaaatggacagttgtaagaagattatcaaagtttggtacaacaaaagcttgataatgaactcgggaactcgcaatggtcgctctaccaatgaaaatgtatccaaccgagataaaacacgaagaccgaacgaatattttacaggatttaaacaatcaacagaatcaaaagtgaaaacagataaacgaaaaaactttttttggttgcagtttttttgagaaaaggtgtcaatagtcttcaccttcatcttcttcatcgtctccaccttcagcaccaacttcttcgtaatctttctccagtgcggccaagtcttcacgtgcctcagagaattcaccttcctccattccttcaccaacgtaccagtggacaaatgccctcttcgcatacatgagatcaaacttgtggtcgatccgtgagaacacctctgcaactgctgtgttgttactgatcatacatacagctctctgaaccttagcgaggtcaccacctggaacaactgttggaggttggtagttgattccacatttgaacccagttgggcaccagtcaacaaactgaacagtcctctttgtcttgatggtgccaacagcagcattaacatctttgggaacaacatctcctcggtacctcggccgcgacc

SEQ ID NO: 406 - DNA, 672 bp, Arabidopsis thaliana
tttttttttttttttgatatgaatagagatttttatagaggaaatgatagaaaaacaaaccttcagttttttcactttggcaaaataattacttaaatttacattgaccatacaaaattgggttccggatagtcaacattgaatattccagaaaaggatttaagcatcagtgaagcttgggggcttgtaggcaatgaaactgatgcactggacttgacgggtgttgtcgaatccgatgatcctaatgaaggcgcccgggtactccttcttgcattcttcaacttccttcaatacttgagcagagtcggtgcatccgaacaatggaagcttccacattgtccagtaccgtccatcgtagtatccgggagtgtttccgtgctcacggtacacaaatccgtgctccaactcgaattcaacacaaggaatccacttgttgcggagaaggtagtcaacttccttagccaattcgacgtcagtaaggtcagggaggtaagatagagtctcaaacttcttctttccgattggtggccacaccttcatgcagctaactcttcccccattgcttgtgatggaagtaatgtcgttgttggccttgcgggtgaccgggaaagaagcggatgacttcaaaccagtgaatggagcgaccatggtggcttgagccggggaggtaac

SEQ ID NO: 407 - DNA, 672 bp, Arabidopsis thaliana
catcttacaattttattggaaacaagatctgttaacagaaaaagaaaaaaagaacagcttcttcctacacagacaaagctactttgaggttaaaagaaaaggaaatgaaacatggatgtggtttagaagaaactaaagagtggcgcctttgaagatgaggaagttgagagtccccaaatgaaaatagatgaaagttcctttagaatgtgtgaagaaacacccaaaattggttcccacgacacattgccatccacttccatatctctcatcgaactccttcttgatgtgagcagcgatggatatagaatcaaagacatcaaaaagatcgagagattgagaagcaatcttcattgcttgcatttgcatcttcacaggcatgtctgtctcttccaccttcgctttcccttccaacatctttttactcaaagactcaaaatttctttattaaaacaaaaatagagaagataactcgtaaggagaagataaaaatgaattgtacgtcacgttttggacaggttttagggagagaatctccacatgttctgcctctgtcgttttctcttttcttcctgagtttaaggaactgtattattaccttgcagatatctagataagaaaatcttgcttattcttcttcgttcttcttatctttaacttttgttttggtcacaa

SEQ ID NO: 408 - DNA, 672 bp, Arabidopsis thaliana
  misc_feature (1)...(672): n = A,T,C or G
tttttttttttttttttttttttttttttttttttttttttttttttttttannnannnnntttccnntgtattgatagaaataattcacaagtatatgttatttagcttttcttaaaagtaaaatattgatctcctaaatacataataattcagccggttcggaatttggatttactgatgagcggtccgaccagtgggtgtactgagctttccttgcatccagttctgaagcatttgcaatgctgcctttggctgatccatcggaaccatgtgtccagcatcatggaccttaaggaaagtgagtgaaccgtagttcttcattaaacccgcttctttgttgtctacgtggaatggaactgttgcggctgctacaaactctttctggcctgaccattccatttcgtgaacccactttgagtttccgagccaattgcagatgagatcgtattctccggcataaacaaggagcttaattccatcttgaagaagagctggaatcccgacctcaagattccgcatccagtccatctgcattgcttcgtagaccgctgtactgcaagacacaaactcgatatctcccacacctaatgccttccgcaccgatttctggttcaagaaattctccatgttcgagaaatcatagcacaagcttccttcacattgtttcctc

SEQ ID NO: 409 - DNA, 671 bp, Arabidopsis thaliana
  misc_feature (1)...(671): n = A,T,C or G
tcgagcggccgcccgggcaggtacgatgttctgattgtcggagctggaccggccggtttatctgttgctatacgattgaaacaactgtctcannnngaacattgatctatctgtttgtgtcgttgagaaaggagcagaagttggaggacacattatatctggaaatgtttttgaacccctggcacttgatgagcttcttccacattggagacaagaacatgcacccattgagatccctgcttcttctgataaattctggtttttgacgaaagatcgtgcattttcacttccttctccgtttgataacaagggaaactacgttattagtttgagccaactggtgcgttggctaggaggaaaagctgaggagcttggaacagagatatatcctggcttttctgctagtgaggtgttatttgatgcaagtggtaaagttgttgggattgcaaccaaagatatgggaatatccaaagatggttccaagaaagagaatttccagccaggtgttgacataaaagggcgagttacactgtttgcagagggatgtaaaggatcattgtcagagagaataatcaaaaagtataaattaagagaagaggttaatgcacaacatcaaacatatgctttgggaatcaaggaggtctgggagatagatgaaagcaaacataacc

SEQ ID NO: 410 - DNA, 671 bp, Arabidopsis thaliana
cttttttttttttttttgctttggctaactaattgaagttgagccaattatgaaaagaaaatgttaaatatcaccataacaatcatctgcagtctttacgcctaaaagccaaaagactagaaaaaaccctcccatagatggtttctttgtattatccagagaactcttgaagcaaaatcgttaaagaacggagaccggatcatagctcgtcatttccatatccctcatcatcttcatcccctccgtattcttcaccaccagctggtttttcatttaccgcaataagctctgtgtcaaagatcagtgttgcaccaccggggatagtaggtggagagccttgttctccatatccaagtttagcaggtatctttaacttcctcttctcacctacacacgctcctagcaaaccttgatcccaacctttgataacctgaccacttcctaatttaaactcaaacggatcacccctttcaaaactcgaatcgaatacagttccatcagtaagtttccccctatagtgcaccttgatcgtatcacctttgtgagcctgaacttcacatgtttttggcttaaacttgacaccgatctgcaattccgacacatctccggtcttcttggcaaaaccttggagtgaaatgagagagaagaagatcaaaaagagagagtaacgg

SEQ ID NO: 411 - DNA, 671 bp, Arabidopsis thaliana
aatcttaactattcttacaaactgtacaaatcaatgcactatttaagagaaacaaaatgattattctaaggaaatagaagaaggctcgcataaacacgaaccactagatgaagagcctgattcactactagagctactcgaactgctgctttcattatttctacatgcagcatctttttctatcttaagaggaggatggcttgagaccgaggggtcattcccaccaactatgtcaacatcctcgtcaatttgcagatcacctttactaggctgcaaaggggaattactgaatccagagtcatgaacaatctccatctcacaaggttcgctcttttccatggatttctttttctcccttaaatagtcatccaggagtttccgaaccatgaacaagatttcatcagaaagcgcttctatatctatctcaatctcaccttctccagattgaccatcactgccactttgctctctcaggagatcagcaatcttttgagggaaatcttcttctaatgccatcagatcttggcctaattttttcttctcaccatctgtcatgaccaacttagcaggttccaccctcagcttgttatcgttcattgcagcttccttctttctcatcggtgctacttcgaaagggatttcagactccagagaagcagacggacgcgtgg

SEQ ID NO: 412 - DNA, 671 bp, Arabidopsis thaliana
tttttttttttttttagttgtctttcttcttttatgaattctctttctatatcgctttacagttttttctttaggtagccatctcaagaacttcagtaattacataacacaccatatgattataattctgctgtagaatacggaagacccaagaacgaccataagaatcagcaaagacgaaaaaaaggaccagagtgaaacataacacagttaaagagttagagaaaccacttgtgtatatattttgtcttcttcaacagacttagctactggtcagcaaaaagcgttcgtcgccttcctgactttgcttgcagacggcttgtctctgcatgcacgatttcattaaccagatccttgaagacaagcctctcaacatccagcaccaatcctgacatttctccactgaagtctgcccagttcccagatcgaatcgtcacatcttcagcaagtatacttttcaagaagtcgtcttcttcttccaataaaaagttttctgatctctttgtggcttgcttttgctgtgtttctatcgctgaacacagttctttcagtagttgttgcgcactcacggctttcttagtcaccttagcatatgacttcatcaatggattcgtcgtggcttcaactgacgctagtttctccaccagaatctcattaacgcggacgcgtgg

SEQ ID NO: 413 - DNA, 671 bp, Arabidopsis thaliana
  misc_feature (1)...(671): n = A,T,C or G
ttcctgaacgattcttagggttttgattctctctctctctcgcttctttttcgatcgcagcagctctcgccgatcctgtgtaatcgggaatcggtaatcgtcagggtctgtttggggtacggcgacgcgattttctgattattagggtttaagatctcgaggttgaggagagcttgaaaagttgtttgtcaacatggagcgcaagactattgacttggagcaaggatgggactatatgcagactggaattactaagctgaaacggattctggaaggattgaatgagccagcatttgactctgagcaatatatgatgctttatacgactatctacaacatgtgcacccagaaacctcctcatgattactcacagcagctttatgacaagtatcgggaagcatttgaggaatatattaactcaacagttttgcctgcgttgagggagaagcatgatgagtttatgctgcgggagctatttaaaagatggtnaaaccataaagtaatggtcagatggctatcccgcttcttctactaccttgaccgttacttcattgctcggagatcacttccaccactgaatgaagttggcctgacatgcttccgtgacctggtttataatgagctacattctaaggtcaaacaagctgtaatagctcttgttgataaagaac

SEQ ID NO: 414 - DNA, 671 bp, Arabidopsis thaliana
tcgtatgacgaagattctcccaagaaaagcagtactcgtgcagcttcgagatctacttctaatgtttcatctgggcatgatctgctttcacgaagagcatcacaggcacaacaccatgaagaatggcataccgacttactagcttgttgctcggaaccttctctttgcttcaagacattctttttcccgtgtggtactttggcaaagattgccactgcagcatccaacaggcacatctcttcagctgaagcatgtaatgagctaatggcgtattctttgatactttcttgttgctgctatacttgttgcgtgaggaggaaactccggaagacactgaacatcacgggaggattcattgacgattttctatctcatgtaatgtgttgttgctgtgcccttgtacaagaactgagagaagttgagattcgtggggcatatggtacggagaagacgaaaataagcccgccttcgtcgcagttcatggaacattgaaatcttctattatacaaaaggtgaacaaaaacaacgatttgttgtaactctggatacgagacgagattcttcttcgtactactcacttaatattattgtgttaaatcgtggagtcgtatgtaaattagtttgggattctcatcttaatttcagcaatttgtgttgtgtgtaaaaaaaaa

SEQ ID NO: 415 - DNA, 671 bp, Arabidopsis thaliana
  misc_feature (1)...(671): n = A,T,C or G
aaaactattcccaaaagagtagagtttacaagactaaagatggaattaaaaaaangaacagaaaaagatggtaccgcttttatttcatttagacaacaaagaactgagattttgggagaaacataaacatgaaaccagagtaaacaaacatccaagtatgttttggaatcaaggtacgatcttgaacgccttgtacttgtcaatccaagagataaaagagttgttggagttcctgaaaccaaggaagccatattccttactcttgttcatactatcaatcattccttcaactccaagtataacatcagcaaaccaccacacaccaacttcctcaagcttcttctcttgcaattgattctccttaaccatctcctcccacactctctctttccctttcatcatctccaccaaccccaaattcttcccttcctcaaatccatactcctcaatcccaaactgctcagctagaatcttccacagatgcttccacttgaagatatcagcattgttgcagttaaacgcctcgttcttcgcatacggatcaaccgccgcccaaatctgctgctctgcaatcaaatccgcgtcagaagccgtcatgaacccttcccaagctttcttgctcccaggaaacaacaacggagacccttcatgcttacatatcgctgcataga

SEQ ID NO: 416 - DNA, 670 bp, Arabidopsis thaliana
ttgggttagaagattttttatatattaacaaaattagatttaatacatgtcgatatctcatcaatcatatgagttaacaactttgaaaactctactttatatattatatatgtttgtattaaaattataacaatttcttcttcttctttttttattacaaataagaccaaaccaaaataaaaaggaaaaaaagaggaattgtgagctttaaaacaaggcatacttctgggtccagcttcgagccatggcttcatatttggtcttgtcagttttgtatatgtgagctatctctggcaccagagggtcgtcagggtttggatctgttagaagagagcatatagagagaagcaccttagaaatggtaagggcagggctccattggtctttgagaatgtccaaacatatgtttccattactgttgatgtttgggtgaaacactttggttctgaatacaaccttgggaggtttaaaaggataatcaggagggaaatgaatattgacaaggaaaacacctccggagtaaggactttcattcggacccattatagtagcttgccagtggaacatatcttctcctgttggacctgcactgcatgatacaggagggtctctttgcaactccttcaattctttcaatatccgtctcgttgccatcaggttgctgagtgtt

SEQ ID NO: 417 - DNA, 670 bp, Arabidopsis thaliana
tagtgggtgatatcaaggattccatttgtcgagttcctgatactccctatgacgataaatcatattcaaacatccctactacgtcgtacgagcttcctgatggccagacgctcgagattggtgctgataggttcaaagttcctgatgtgatgttcaacccgtccatagtccagacgattcctggaatggagaagtatgctgagatgattccttccgttcgtgggttaccacacatggtcatggagagcatcaacaaatgtgatgtagacatccggagagagttgtatagtagcatactgcttgctggtggcacatcgtcaatgcaacagctgaaagaacgtctcgaaaaggacttgatcgaagagtctcctcactcagctagagttaaagtgttggcaagcggtaacacaacagaaagaagattcagtgtatggataggagggagtatattggcatcactaggctcatttcaacagatgtggttctccaagtctgagtatgaggaacatggagcttcctacattcagagaaaatgcccttaaagcaggcagtttcagattatgtggagtctgacaagacgaaacttggaaactaatgtgttattttcattgtgcatcgttgttccttgaagattattagtattccgcctgaaccttttaggcggccgcga

SEQ ID NO: 418 - DNA, 670 bp, Arabidopsis thaliana
tctcatcttatttttcatttttttcaagaatttaaagtagcaataccatttctcttacagaagggtctcttgctttattggtatattctcatgagtacatgttttaaggaaatatcaggaactagtgtttgtctcagagcttggaaggaggtttgtaccatccccatggttcatcagagatatactgagtcacctgcttcacactcaagtagttctcaagtccccattctcccaattcacggccaaatccactgcgtttggttccaccccatggagcttggcagaagcatggctgagagcagttgacccacactattcccgcctggaaagccttactaacacgatcacaccgctccagatcatttgataatactgcgcctgctaatccatattgagagtcatttgcaagctgaattgcctcatcctcggtggagaatgttttcacacacagagcaggaccaaagacttcctctctccagatttccattgaagtagtcacatttgaaacaatcgcaggttcaacaaagtatcccttctttaaatgctcaggacgaactcctccacaaagaacagttgcaccttcattcctagcgtttgagacaaactttagaactctctcgtactgtcctttactgacaacaggaccaagcctacagccttcttcaaaagg

SEQ ID NO: 419 - DNA, 670 bp, Arabidopsis thaliana
  misc_feature (1)...(670): n = A,T,C or G
ttcaaagttgcgagctttgaaacccttccagtgttttgtgcggtcttcattgagtagaaactgacatctggtcttggttggtcaccatgaatcacagcaaacctgtgacccttgggctcccatgcaaaagcaatgatcttgtcgnncntgttgtccagctcaagaacctcgatgggaatatccctttctttgatacggaaaagttcaaatccagagtatgtgctcttcttagtttttgtgtatcgatcaaccttgacagcaagatactctccactactctgccagtacctcggccgcgaccggcgcgagcggccgcccgggcaggtgaaaacgaaaacacttttatacttatattgcagccatggctccgactttgcaaggccagtggatcaaggtggggcagaaaggaggaacgggaccaggacctagaagttcacacggcatagccgcggtcggagacaagctctacagtttcggcggcgagttaacaccaaacaaacacatcgacaaagacctctacgtctttgacttcaacactcaaacttggtcaatcgctcaacccaaaggagacgccccaactgtatcctgcttaggcgtgcgcatggtggccgtgggaactaagatctatatctttggaggccgcgatgagaaccgcaacttcgaaaacttt

SEQ ID NO: 420 - DNA, 670 bp, Arabidopsis thaliana
gcggccgcgaaaagcatccccactaatttgtatatatgacaaacgagatagattcaaaatgttacaaaatagagtggaattgaacaaaacaaaaaagggatatagattagagattcagagaaaatagatgcatgcatgtgtatgtacgcaaaattagataatgacaataatataacatgaaagatggagattgacatgaaaggcccatgtggaaagaaaagagtgattcaaggagaagaccaaagctgagcattcttgactttacaaatactctctaacacatctaccggcaatatgttccctttcaccaccaccttcttgctctctagctccactttgtaccatgtcactccgtctaatttagaaatatgcttctcgactttcttcgcacatccgtagcaatgcattgacacctttagctccactatcttaggcttaagatgaaaggcaagagtctgacgatgatcagcagctacaacatcttttaacctcatgactttcccagatttctctgttgaagaatctatcaatggctctttctcaaactcttcttcttcatctcctagagtgtttagacaaaaacatgaacactgatttgtcggaagaaaaagacaatcccatactctcccaatcttctggagctttcccattggtttgaaaactgcggccg

SEQ ID NO: 421 - DNA, 669 bp, Arabidopsis thaliana
  misc_feature (1)...(669): n = A,T,C or G
tttttgttttccgatttcagtcggatctgtttatactcttgcttatatgcaagcttaataatttccggtcttggatcggacttttgtttccggctatgtccggtctcctttctcgcttatagcgagtttaaatcttcttatcctctttggctttaatcatcgaagtcttcgattgtcttccaacttctcttcgatatctccaattgctcgaggaataatatcttcgtcactctccttttgctcaaaatcgatgagcaacgaaggatcttagtgtacatcaaattgggtgtagctggtggtggagcctccccagagttggtgctttccggagaaattttaaagcgatttcatctaaacccggtagatttcggtgctatctcatgcaggattgaagatcggcagaaggaatgaagaccccagcgttctagggctgacacgcgacggctaatcagcgcttgggagatgagcggcgaattacagacggtggtgcttcatgaaaagacgcgtggtttcaagggaaatacgtcttctccacgtgtcatatgctaactcataattatcatgatatgttaatgttaattatgtttttagtttgggccgtttantnnncttgtactcttcttggaccttctgtatgttgtcctttgggcatataaatgaatttggtcg

SEQ ID NO: 422 - DNA, 669 bp, Arabidopsis thaliana
agctcccaatcgcatcttcgcttcctctccctctttttcttcaaccgccgggatctctaatgtctcagagattctcacacttcccgaagtggagaagattctcgccgacgtgaaagctgttaacgtgactgtgattcctacacataatcattgtttctgggctgatttcactgtcatcgccaccggtagatccgattggcacttaagaaacatcgctcaagctttagtttatagggccaagcaaaagcagaaaggagctaaacatgtaatgttaccttctgtgcaagggtacaatagcaagtggattgtcatagactacggaaagtttgtagtccatgcacttgatgagaaagccagaggttatttcaatttggaaagcctttggtctgctgaatcctctggtactgatacttcagatcaggatctccaaaacgtttttgtaaaggtccgaccaaagaacaattcgaaaaggaaaccggctaaagtgagttcttgatcctgtccgatggatacaatttctcataaacttctcgagtctagacgagttaagaataggaggattttaaagcctattaagtatttatctccttaatatttttttttggtaagttttatctccttaatatttgtagtcatctatctattttttccttaatatctttgcttaaa

SEQ ID NO: 423 - DNA, 669 bp, Arabidopsis thaliana
atattgtagagtgagattctaaagagagagagagagagagatatggctagtggaatcgctcgtggtcgtttagctgaagagaggaaatcgtggaggaagaatcatcctcatggttttgtggcaaagccggagacggggcaggatggaactgtgaatctaatggtgtggcattgcactatacctggtaaagctgggactgattgggaaggtggattctttccattaacgatgcacttcagtgaggattatccgagcaaacctccgaaatgtaaatttccacaagggtttttccaccctaatgtctatccatctgtaactgtctgtctctctatccttaacgaggattatggatggagaccagccatcaccgtgaagcagattcttgttggtattcaggatttacttgacacaccgaatcccgctgaccctgcacagacagatggttatcatctcttctgtcaggatccagttgagtacaagaaaagggtgaagctgcagtccaagcagtatcctgctcttgtctaaaacctcaaaaaagagaacgcaccaaaactgatgacaagctctgaatattttctcgtcttgtgtcattatgtttagatgtcattgggtgattgaaaactcctcattttggcaccttaagacactggaatctatttattttcgaaa

SEQ ID NO: 424 - DNA, 669 bp, Arabidopsis thaliana
gaatcgcaaggaaggaagaaacttgagaggaagatcatgatcctagctgtgttgttcgccaattccgttgggaatgttttaatcgaaaggttcaatggagtaccagctgaggaacggctccactggcgatctttcttggttaagttgggagcagataatctcaaaggcgttaaaaatgaggagcttctcgttgcttgccacaagtcggtttatatcgtgtacacaatgctaggggatgttagcatcttccttgttggcaaagacgagtatgatgaacttgctttggcagaaaccatctatatcataacagcggctgtgaaagacgtatgtggaaagccgcctacagagcgagtgtttttggataaatatggaaggatttgcttgtgccttgatgaaatcgtttggaacggacttctggagaacaccgacaaagacaggatcaagcgactcatcagattgaaacctccttctgaagtttgatatgctccaaccaaccacacattcttcttctactcattttaagagctttctcattctccaccgattgttgtttgttgaatcacttctctatatcacatattcaactatcaactactgctgttgttcgatcagtccatcttgtagtgttgttttttaaatcttcagtttttagtgttacataacaaagaa

SEQ ID NO: 425 - DNA, 669 bp, Arabidopsis thaliana
  misc_feature (1)...(669): n = A,T,C or G
ttttttttttgagatcaaacaatacatactactgatttataaacaaccatcacttgtttttgtttctttttgcacatattttattgagtttttgagcaaacaccaaatccaaaataatttagaagagaaactaaagaaagaaagtcatcatcttttttcttcttatggactagtctctttagttaatatccacttgaggaactataccaccagcttgaatgatctgtttctcaagattgaacatatcttgaagctttgtctttaacgccttgtactcaatatccacttgctgcaaacatctcacacacccttcgtagttcttagcttcacaacattccttgaagctaacacacaaagttttgaccctcttggcaccaacacttgagctactacccttcaattgatgcacactagcacctacctgactaaaatctacagttcctgtcgtgtccaaagctctagccatgttactgataagcttcacacaatcttcaaagaaaagtgaaagcacttcagacacaaaatcaggacttccatcatcttgtagctttttcaactcagtaaattgatcatccaaanncccctgttggtagagagaaatggtgtaatcacgaaattgtctctgaagctgagcaatgagagcgtccatgagaagagtgaagcggagat

SEQ ID NO: 426 - DNA, 669 bp, Arabidopsis thaliana
ctttttttttttttttttttgttcaattcaatataattaagcattgggatttccaacagaaaatgttgagtaaaacatagactagtgttggatatccaaaatagaactcaaaccacattcactaatgccttattgataaaaataaattgcttagcactcagactgtaattatgggagaaagagctttgcagaagtagaccaagttgctaatgttcatacctcaggctgcattttctccacctcttcccggatagactggaacagcggggtcgatagatatctctccccgaagctcgggaaaacaacagctatgagttttccagcattctcaggtctcttagccaccttgattgcagcagcagctgcagctccagatgatataccaaccatcaagccttccttaagagctagttgctttgcggtttctatagcttcctcacttgaaatcgctatgacttcatccataattttctgatccaaattcttaggtataaatccagctccaattccttgaatcttgtgaggtcccggtttgccaccagaaagtatatcgctttcggtgggttctacaccaataacctgcgttttgggatttttctctttaataaatcgaccaacaccagtgatagttccaccagttccaattcctgcaacaaagatatccacctt

SEQ ID NO: 427 - DNA, 669 bp, Arabidopsis thaliana
  misc_feature (1)...(669): n = A,T,C or G
ttttttttttttttttttttagcaaaaacacattcaatacaacactgcttaaattaataaatagaaacagaggaagtaaattattcgtgtacgttagggtttttaatcttaaaatataaaaaacttagaaaactaaagagtacaagtcttacaaaagattcagaacagaagcttttcaagaaaccaacaacttcagaagaaggaaattcttggtagtaacttaaacctggaagattcattctttcttcatggagtctttttggagacccttcttccggatctggaggcatctcttgatgttaaatgattcaaaaacgctttcgggcaatgcagagacaactgcacccatgagagcgtgaggccagtacggtgtgcattgtgcttcatagcctacaaaacgcagtgctgcctttgcgtaaccctctggtgatgcaactaagaaggatgctcttcttatttttgtcatctttgttgcaacatacaagggaacctggcattgaacatcaatcccactcttcttatactcaacatgtagacactttgtgaactgatccacgtacgtnntagcaccagcataaacagagtaaaannnataagaaggaataagagcagcagcaccagaacccatattaataatagcacctttcttcctcttaagcatattaggca

SEQ ID NO: 428 - DNA, 668 bp, Arabidopsis thaliana
  misc_feature (1)...(668): n = A,T,C or G
ttttttaaaagaagaaggaagaaagcagtcatttgaagatagtagacgaaaagttgtacaacattacacagaaaggaaaacaattattgggatcatagtaagtaatctcccatgattcaatttcaaatcctaaaaacagatgatttcaggctgtagcctcgatttcatcggtgcttagagctgcaccattcggagtatcttctgatttgagctgagaggagacatcgtcgatagcagagttaagctgagcaattttctcagctagtaccttacgtgttttctccaaagctttttcctcgtcatatatgaatttaggcaacttcctcatgagatcctttcggtctgctccagctatagccttgctgatctgtggtgcatatacacatccgagggcaccgactataagtccgcccaaaataaaccctccgacgaataggcctgtgctgcctgaaccatcatcatctctgtatgcagattgaatggttaggatccttttggttctangagcagaaatatgaagtttgttggagtgattcagtccaaatgaaacactgacacaacgagcatttggattcagagaaaaaccagatgaaggatggagttggtgagaattcttggggagagagagagaggtagaagaaagagacgccatggatggaagacctgcc

SEQ ID NO: 429 - DNA, 668 bp, Arabidopsis thaliana
  misc_feature (1)...(668): n = A,T,C or G
ttgaagtatcaactgataaataaaactgaaatgaggtgataaacttcaacagtgatacaaggaagaaaacaaaatctgaatagataaaaaccaaaacaagagttaaaccaaaagatagatgctgattttcttcagtacttgatcgatgcaagaacatcgagctgggatccaagtttctcctctgcaaccttctcggcctttgccctgagcttggtgagttgcttcttacgctcatacaaagcttgtgacctctcctttctcttcacctcaagctcctgtaaaatcattaaaccaacagtaaattcccagtttcttccacagattaagtgagataattttctcctgactaaactaagtacaatgatatgatcttaagttataaattaaaacaatcagcaaaagacccagaacaatgacaaagatgtgtcagtagatgctattcaaatcaactcataggaaacttacaaatacaattttagtaaatgaagcaccttttgttccaataataaggcagacgaaaaggacaaaagggacataccttgatggtatcgtaatggttccagccaacttcagaagacaaacgtcccaacaagcagtacttgtgaccagnnnaagcctcaacaccctaaacaaaacaaaacaaacgaaaaccagttcacagctaaaac

SEQ ID NO: 430 - DNA, 668 bp, Arabidopsis thaliana
  misc_feature (1)...(668): n = A,T,C or G
actgcaaagacttctgtttcacgtccgtttgcatggtcgagaggtaacatgccaggcgaaagtgggtcgggccgtgggccgaattgggagtacaattggggttggggctctgctccaggatctggatggggttacggggcaggctcaggtagatcaccaacaggatggggaagaggatccggatacggttatggatctggatcgggatcaggtaccgggtatggatatggttctggaggtggtggagcacgtggtggtggatatggttacggaagcggaaatggtcggtctggtgnnggtggtggtggtggtnnnnnnnacggtgaagttgccgctttgagccatggtagtaagattcatccgtaaggacgtttgatttggtaatttctcccaactataatattttgggaggagtataagcgtttgcaatattaaaagattattaggtttggactttggtactctgttaaatgtaagttatcttcctttgccttgtatgcttnntatatagattatgcgctcgacgtatcttataatgtctgcatgtctcttaagtgtgatctcttttctttcttttttttggtatcaatattaagtatatttagtgtttttggtatgtgtttgatcatttgatgaaaacaaatattatcagatttgcatttagttaa

SEQ ID NO: 431 - DNA, 668 bp, Arabidopsis thaliana
  misc_feature (1)...(668): n = A,T,C or G
tcgtcgacgcgcgccaccacatgcttggccgtcttgcgtcgatcaccgctaaagagcttctcaatggccagaaagttgtcattgtccggtgcgaagagatttgcctctccggcggactcgttcgtcagaaaatgaagtacatgaggtttcttcnnnaacgtatgaacactaaaccttctcatggacctattcacttccgtgctccttccaaaatcttctggcgtactgttcgcggtatgattccacacaagacgaagcgtggagctgctgcattagcacgtctgaaggtatatgaaggtgttcctactccatatgacaagatcaagaggatggtcatccctgatgctctcaaggtgttgaggcttcaagctggtcacaaatactgtctattgggccgtctttcttctgaagttgggtggaaccattacgacaccatcaaggagctggagacaaagaggaaggagagagcccacgtggtttacgagcgaaagaagcaacttaacaaacttagagttaaggccgagaaggtcgctgaagagaagctcggagcacagctcgatattcttgcgccagttaagtactgagcttgtcagtagtagtttttttttttttttggtaaggagcttgtcagtagtagtttgtcttggcatgttttgagccaacccaat

SEQ ID NO: 432 - DNA, 668 bp, Arabidopsis thaliana
cctcttaaaaaactattacacttaatactttggttttgtaaatgacagtttctgattattccttcaaaatataatttgaagtttttaatcttctaaaggtaataacacgagacgaagcacaacacagttcgatcatagaagaggatagaatgaagcataaatatgaatataaaagattcataagaaccgaagaaaactgtttctctagcggttaccatagtatggaggacgagacatgttgttctgaggttgatatgactgtgattgctctctcggtcttgcatactctgcgaatatgacccaaccgtcaagaaacttcccgtccattccagctatgcctttggcagaatcttctaaagtggcatatctaacaaatccaaaccctttggaatatcctgatactctgtctgtgacaaccttagcatcagcaacttctccaaactgagcaaaagcagtccttagtccttcagaagtggtgcgcttactaagcccggagacgaagagattggtgctaggttcagcctgaggacgagccggtgtttgggattcagcttgtggagacaaaaaagagaaccttgaagcatttgaacagaacagtcgtctcaaaccaaccggagctgaagctacttccgtcacagctctagatatcgctggaagtctcgcggccg

SEQ ID NO: 433 - DNA, 668 bp, Arabidopsis thaliana
ttttttttttttttttttttttaatcaaaaagcaccgtcataaaataaaaagaaaacctccatagtgtatttgacagtaataatgcaaggaaaaaagaaagaaagtaatactatgctatttataatagttgatgtatttttgaggtttagcagcaggaatagatgacattctctgatactgaagaaacgcaagaggttttagccgctggcaacaatctcgtgaatggcctcggcgacagaaacgtcttcagctctaactgtcagcttcattgcaatgtcctttgagctgtccattccaaactgtgccctcactaacactttcacgttgcctatgtacacacctgacaatagacacgtgtgtgaccttgcattgagcggaattgtctccgtcccctcacaagtctgcatgccaagaagatccatgacagcctttacagcttctcccaaactctctctttggccaaggccatattcgtctacacgctcatcttcttcatccatgctttcccacgcattcctgaaattggagacacccactttcaccatgtaatctccagctacaacctcaagatcctctagctggtactcatcttctactccatcatcttctgcttcacctgtgcttgggtcaacctccttaacaacgaaagtcaatgtgttggagaact

SEQ ID NO: 434 - DNA, 667 bp, Arabidopsis thaliana
  misc_feature (1)...(667): n = A,T,C or G
gttgtaatttaattcttgtaaccaaatagtggaatatacaatgaagaaacattcatatactgtatgtctaaactttcacaacaagcatttttttttgttcaaatcacaacaagcatattaacaacacaaacagaggattaaacctcgttttattactacatatannnnncaaatgaattacataaagaaataattcttagcgggtcatgccgccttggaagaccggagcacccatggccacacctccttgattctgttgtctctccacgttccccgcccatccaagactcatatcgtaaccgcggtgcttgagttcacggtattgttgggtcaaagaacaaagctcacagcagaaatgtttaaggcaatcagtacaatcatctcctttaatattatattgagctctcatctttccacgatagaaacatgagtatatacatgcacaaccagttactacggctatcaacgcgtatagagctccagcagtaccacacgatgtggatcctcgatctacaatctcggcgacttggccaaaggtgatacatggacaccagaatgtgatacaacaatttttgcagtcagaaaagcaatcacagaagcctgtggaccattctccttcagcatgaggcttggcatgaaggtgttgagcttccatgaagagagagag

SEQ ID NO: 435 - DNA, 667 bp, Arabidopsis thaliana
  misc_feature (1)...(667): n = A,T,C or G
taattttgtaacgatcatatctaaaataaattgtagtctctctactcccctaaaagaaccttgtcnnngaccatctgaaaatttagttccgacgaaccataaataggcttcgtcgcttcctcagccaagcgctgccactcttcgaccttttgcctcattttctttcctttgtctccgtccatgagttctctaaccaactcctcaacctcctccctcctcacatctccaccgatctccatccccacttcccattcatcacaacaatatttataatttgtttgctgttccgcaaagaacggccaacacaccattggaactccaccggagagactctccaaagtcgaattccatccactatgcgttaagaaccctccaactgccggatgagaaagaactttttcttgaggacaccaactcgctagcatccttcggttagccgtctctattagaaagtccggcggaagcattggcacatcaccggctactaaatccggcctaatcacccacaaaaaatcttttttggtcgccgctaaaccccaagcaaactccacgagttgtttcgcactcatcactgttatgctaccgaaattaacataaacgacactgtttggagacttagtatcaagccaatccaaacactccatctcctctctccacatattcgttc

SEQ ID NO: 436 - DNA, 667 bp, Arabidopsis thaliana
attctctgcacgttttcatggcgactcaagattctcaagggattaaactctttggcaaaactattgcatttaacactcgaacaataaaaaatgaagaagagacacacccgccggagcaagaagccacaatagccgttagatcatcatcatcatcggatctgacggccgagaagcgtccggataagatcatagcatgtccaagatgcaagagcatggagacaaagttctgttacttcaacaactacaacgttaatcagcctcgacacttttgtaaaggctgccaccgttactggaccgccggtggtgcactccggaacgttcccgtcggcgccggtcgtcggaagtccaaaccacctggtcgtgtcgtggttggtatgcttggagatggaaatggtgttcgccaagtcgagcttataaatggcttgctcgttgaggagtggcagcatgccgcagccgcagctcacggtagtttccggcatgattttcccatgaagcggctccggtgttactccgacggtcaatcgtgctgattataattatttactctcttttttaaaaaataatttgttttggttttggggttgagtggttttcctctaaacccgttgaagaacgtggtgaatttggttgctattgggtacatacaggctggcaaagtagttaattt

SEQ ID NO: 437 - DNA, 667 bp, Arabidopsis thaliana
ccacgcgtccgcccacgcgtccggatcataaatccaaaaccactcatttttctattactgaaatttttcttagagaagaagaagaagaagcaaaatggccacaagcgcatcagctttgctctcaccaaccacattctccactgcaatctcccacaaaaaccctaactccatctcattccatggccttcgtcccctccgtctaggtggctcctcctccgctctacccaaactatcaaccaccgggagaaaatcctcctccgctgtcgtgagagctgagctaagcccttccatcgtcataagtctcagcacaggtctctccctcttcctcggccgtttcgtcttcttcaacttccagagagagaacgtagcaaaacagggcttaccggagcagaacggaaaaacccatttcgaagctggagatgatcgtgctaaggagtacgtcagtctcttgaaatcgaacgatccaattggattcaacattgttgatgttcttgcttggggttctattggacacatcgttgcttactacatcttggctacttccagcaatggatacgacccaagcttctttggatgattcgtttcaatgtcaatctctcgtatatgtatatgtatatgtttgacttgtgttgcaagctatctaatctgttctctaaaaaaaaaaaaa

SEQ ID NO: 438 - DNA, 667 bp, Arabidopsis thaliana
ccacgcgtccgatcaaaacgttaattcgattgatcgatgaatcctagaagggagcctcgtggtggtagaagttctctctttgatggcatcgaagagggaggaattagagctgcttcttcttactctcatgagatcaatgaacatgagaatgagcgtgccttggagggattgcaagatagagtcattctcttaaaacgactatctggcgatataaatgaagaggtcgatactcataaccgcatgcttgacagaatgggcaatgatatggattcatcaaggggatttctctcaggaaccatggaccgctttaaaacggtgtttgagacaaagtcaagccgaagaatgctgacgctcgtggcatcgtttgttggtttatttctagtcatatactatcttactcggtaaaattggcaaacccggagtattcctgaacattcatccatgatctcatgatattcccagtctctctctgttggctcctacgatctaattgtcaccaaccagtgtaatgatgtatgcctccagtgttatagtgtgctctagtgcttgggatgaggacacatttcataaaacttataaaaagtttaatatatttggattttatagagtgttttacttcctttatgtataaatagcgactgtccaaaaaaaaaaaaaaaaaaaaaaa

SEQ ID NO: 439 - DNA, 667 bp, Arabidopsis thaliana
ttttttttgggacacaaagagcaaatatagactccaaacattatcaatagcagcagtacttacaaaacgtagaaattccaaacgaaacagagatacttaaaggacattctaaaaccctaactcagatcttccaaattccattaaccctaaagcagagcaacatccatatgataagaaccctaactcaattattcaagagctggtgaatttcgtgacggctttagtcccctcagaaacggcatgcttcgccaactctccaggaagcaccaatctcacagcagtctgaatctcccgagaagtgatcgtaggtttcttattgtacctcgcaagcttcgacgcctcttgagcaagcttctcgaagatatcgttaatgaaactgttcatgatccccatcgctttgctggagattccgatatcgggatgaacttgcttaagcaccttgaagatgtagatcttgtaagtctcgacactcttcttcttcatctttttcttcttgtcgcctccggcaccagcttccttcgggagcttctttccggcctttggtttcttctccgccggagctttctcggcttttgatttctcctccaccggcttctcggaagctggtttcttctcagcgggcttcttctctgctttcggcgccattgatacggtttttctcgaggtt

SEQ ID NO: 440 - DNA, 667 bp, Arabidopsis thaliana
ccacgcgtacgagaaaaccagcaaatggaagagaagaggctctaaaccatgtggaagcggaacggcagaggagggagaagctgaaccagagattctacgctttgagagcggtggtgcctaacatctccaagatggacaaggcttcgctccttgcagacgcaatcacttacatcacggatatgcagaagaaaatcagggtgtatgaaacagagaagcagataatgaagaggagggagagtaatcagataactccagcagaggttgattatcaacagaggcatgatgatgcagttgtaaggctaagctgtccgttggaaactcatccagtttcaaaggtgatacaaacgttgagggagaatgaagttatgcctcatgattccaacgtggccatcacagaggagggtgtggttcacacattcactctccggcctcagggtggctgcaccgctgagcagttgaaggacaagctccttgcctctctatcacagtaactatcacagcagtaactgctatgtaataagtgtaaccgtgttggaggttgtatcaatgtactattgcaagccaaccaaaaaaaactccagcttagtaggatcgtgtaattttccttatatgtaatgttgagatttgtcttttacatataaagatttgagcagaaagcttcacaaaa

SEQ ID NO: 441 - DNA, 667 bp, Arabidopsis thaliana
cagaaagcaaaaaaaaaacaaagaaaggaaaaactcgaaaacaatggttgatggtacaatacaacatactattgcatttggttatttattatatagatatatatatatccatcggagaacttgtttatgcaactgtcgaccgccgtcttcagctgctttctatgctttctttccttgccgtttctcttcttcgatcttggccttaatgatagagtacattgcaactccagcaatggctattcctgttcctatacctgtctgtgtcgatatcttgtttccgaagataacgatggagaaaccgatcacgaacacacgtttcagaacgtttccaaccgcgtgagtcagcggtgcaaccctctccaaggtattggtagccagctgattgtagagatggtaaaacattccaacccagaagagatcagagatgaatttagtcattccaactttagcaatcgcgtcggcgaaaccatggttaagtagtttaggaccttcaacgatgatggcaggaggaatgcagacgaagagtgcgatgatggagatgtaagcgtagacatttgtactgtccatatcagtcatggctttcttggagaagatgcttcggtaagtgaaagaaatgtttgatatcatagcactgatgaaaccgagccagttgaatgatagctcagtt

SEQ ID NO: 442 - DNA, 667 bp, Arabidopsis thaliana
cttttttttttttttttcgtgtaaactactgtattaggtccgtagagacaagttcgaaacatacatcagaggttacagttacacagatacaggtttgaaacatacatctgatgttttatttatttgcataaccgcagtttctgacttcgtgtgactctttacatggaactcctaatccctccacgacactcagagagccacaagtccatatgatctactatatgttgcctcactttgttcactgcatcaggtgaactgcaattcttggaatcacctccaatgaccatgggagattgagggcatccacggagatcacttccatggccacagttgtggcaagtcacaatgtaagaaggcagttcaggagatgaggtctgtttggatgcatgacgccatggatcctgtgacccatttgtgaagataatcttggtcgcagcaattctgtcacttccataatacaggtttgttgcatcgacttcagggtaaacacctttcccaaacagactcttgcatagatccaaatgatactctgtattgatttgatgagaccggatgctatcgtttgcaggtgccacttggaaatatgccacttcagtgcaaacttggaaccaccaaagcctatctgcactttctggggtgaccgcagtgtctagcagatgtttccggc

SEQ ID NO: 443 - DNA, 666 bp, Arabidopsis thaliana
ttaaggcattggtataatttgaggcatatttaaaagcgatatgcacgttaaaccaataactttttattatttttactaaattaaaataaagcagttctatctaataatattacaaggcatgctataaaaagaaaatcacaaaggccattttgcagtaattgcagcgatcctatgtaatctatgaaccggctctaaatatgttgtatcacatttggatacaaaacatacaccagttttccaaaaccatattatgctgcaaaattatttaatagttgattcaacaaaatcttgaatcattttattgtgttggaccatttgttaatacgagcacttgctttctgcgcctctttttcccagtcacatctcattgtgataaaacttaagatcatggtttgaacagcggttcctccaaaaatcataccaccccaaattcccatgacaccgagtttaaaaccccagcccatgagaaacccaagtggaacaccaatgcaatagtaacatcccaagtttatatatgccacgtacgattgccaacccgatccaaccgccacaccggaaagaaccggttgaacgctgttaagaagaacggtgaaagctagcagaagtgagagtttattgacggcgtctaagacggctacactcgaagagaagatccatgcgatttgg

SEQ ID NO: 444 - DNA, 666 bp, Arabidopsis thaliana
  misc_feature (1)...(666): n = A,T,C or G
ttacaggtataattcaatgtgtatatttgttgtatagtataatgttctttgttacatttgcaggtgaacacgagtacctgctctaaagagggatatgatgtacatatatatgatctatgaatcttatgtttctttatcttctagcttgtgttgaacagcttccacaagttggagtaacattgctccaatgaagtaccatgtaactcctgctaacaatatctgctgccatggactgttaactatggataaagccagcgagccgccgatatggtcgttgagctcagaggcggctctgtaacttgcttggtactgaaccaagaatactgctactatggctgtcccaattggaaatttctttatcctgaactgtcttctattttctcttctactagttggtttctcttctgaaggaaatgtcttacgagtcacttgcggattagagctagctttggaaccgttgttgtttccagatgagggaagagcagcgtttgatggactccagtaatcttctccaagcaagtaagctgatcctttctctttggttcttncgctttgttctgcttgtttcattgctgccacaacatcttgaagctttctgatatctggatcaacagctttctttcttttggtaaaagttagactcatgtttgattctggactcaatgg

SEQ ID NO: 445 - DNA, 666 bp, Arabidopsis thaliana
gtcttcttagcttcttatctaccgtaatcatgccaacatcagcaacagcggtggctccatcaactggatctgtccagaaaaaagatcaagactggcgtgcgattttgtctcccgagcaatttagagttctcagggaaaagggcacagagaaccgaggtaaaggagagtataccaaactgttcgacgacggaatctatagttgtgctggttgtgcaactcctctttataagtccaccactaagttcgactctggttgtggctggccttccttcttcgatgctatccctggtgccattaaacaaacgcccgaggcaggagggagaagaatggagatcacgtgcgcggcatgtgacggacatttaggtcatgttgtcaaaggagaaggttttcccacagcgaccgatgagcgccactgcgtcaacagtgtttctctcaagttctctgaaatttcctcccaataagtctatatagtccacattgatgaccactattgttggaccaagttctctccttcaagaaaatttgaaaatcaagtcggattgtttgagattgtcatgttatgttccattcctagtcttgtgtgatatgctcgctccagtgattgttgtttgtcccttgtatggatatctttttaataattatattattgttatctttccaaaaaaa

SEQ ID NO: 446 - DNA, 666 bp, Arabidopsis thaliana
  misc_feature (1)...(666): n = A,T,C or G
gataggcgaaagtggattcagaaacgcattgtacatgatcgatatcggacagaatgatattgcggattcattctccaaaggcctttcttactcccgggtcgtcaagcttattccaaacgttatttccgagatcaaaagtgccataaagatattgtatgnnnnnngagggaggaaattttgggttcacaacacaggaccattaggttgtctgcctcagaaactttcaatggttcatagcaaaggttttgataagcatggttgtctagcaacttataacgcagctgcaaaactgtttaacgaaggactggatcatatgtgtcgggatctgaggacggaactgaaagaggccaacattgtctatgtcgacatttatgccatcaagtacgatctcatcgcaaactccaacaattatggctttgagaaacccttaatggcatgttgcggatacggagggcctccttacaactacaatgtgaacataacgtgtgggaatggtggctctaaaagttgcgacgaagggtctcggtttataagctgggacggaatacactacaccgagactgctaacgccattgtagccatgaaagtattgtcgatgcaacattctacgccaccaactccgttccatttcttctgcggcggctgacattctacacattgcttccg

SEQ ID NO: 447 - DNA, 666 bp, Arabidopsis thaliana
tgtaagttttcgataaaattcttaatactgtcttaaacaaattcacgattttgatttttccaacaattcaaaagatccaaaaaatcttgacgtatgaacgaactctcaattcaaacatttaatttttttggtagccatactaaatctggatcatttctatttcctaaattttatcctcttttccctaaatgaaagaacctaattagattcaagttcaccaaaaaaatatctagatgttggtatgcaaatctgtttgaatatgaaagattcgactattatcttaattacaaataactttctgaaacctttttttttattggtatcaaaattagatatttgatataaaaatagagaatctattctctttttttttagtaagatcttggagattgtgtaatgcttactctcaaactttttgtatacactgtagttatattctttgtttctctcttcatatttggattcctatctaatgatccaggacgtaatccgggacgtgaagaataaaaaagaaagtttttttattgctttatttaattcgtggaaatgctcgaattttattaggattttatctattacacaccatcaaaaggagaaggggaaagagagggattcgaaccctcggtacgattaactcgtacaatggattagcaatccaagcggccg

SEQ ID NO: 448 - DNA, 665 bp, Arabidopsis thaliana
  misc_feature (1)...(665): n = A,T,C or G
gccgcccgggcaggtacaatagtaatgcataatattcagagcaaattagatctcttagtgactgtaactttaagaccatgcttcatgtgaagaataatagaaggaactggctcgatcttgtgtccttcaaagacctttatctcatagttttgtataattttcacagccactgtcttcatctgtgtcatagccacttctttccccaaacaagtcctnnnnccggcattaaacgataagaacttaaaagaaggcacgtgaatcaaccttccactctctgaaatccatctctccggtttaaattccgatgcatcttctccccaaactgatttcattctccctaatgagtaaagacagaacacaatcttcgaactcgcatcgactctgtgtccacttggaagaacgtcggattttgtaggagacttgtgctgaaatggaaccggtggatatagcctaagggcttcacacaatgctccatgtaaatacaccaacttgtttaactcttgagcattgaatgaatcaaaatcattggttcttggagatagttgtgtgttgatttcttgacgaatcttggttatggcttttgggttcttagagagaagccaaaagaaccaagtgagagcagagcttgtggtgtctctaccagctaacatgaagcttaagatcat

SEQ ID NO: 449 - DNA, 664 bp, Arabidopsis thaliana
  misc_feature (1)...(664): n = A,T,C or G
cacgccgtcttcagccatctgaaagtaaagagccatggcgtcttcgtactgacccaattcagcgtagcctgagataagagagttccaagcaaaaggcgatgagtctctcttagacattcgatcgaacacttcgtgtgcaacttccgcgtagccacaagaggcgtagagtctaacaagcttcgatgaaatccccaggttgttccgcaagagatagggaggtataaggtgatgaactctaacgccatggtcaatagctcttaagctgtagcaggtctcgagaagagaagcgaagatctctggttcggttaatgagatgcctttttgagcggaggtttcgaggtctgtaatgacagagtctaaagcttcgagttgggtccggtgaatggattgtttttcgatcaagagaggagtgggggatggtttggtgaaagagagggaagtgaatccattgntgttgtannggttttgtctgtgttgcttcaactgttggtgatgtctgggttnntttttcattgaagaagacgatacagatggataagagaagcttggtttgtgtacaacgatactcaccatcttcttctcttgtctctattttcttccttaggttgttgataatcgataaatggagggaagcagagtcttgtgagaatacattaataacttt

SEQ ID NO: 450 - DNA, 664 bp, Arabidopsis thaliana
  misc_feature (1)...(664): n = A,T,C or G
ttttttttttttttttcaagaaagatgattttgatttcataaatcgcaagtctaacgaattcaaaaactgaaattaattagtctactcatctccaagtttttacgtatccgagtgaccacaacatatanaactactactttgacagtgaggtcaatcgacttacagagaaccaaactataacccgataagatagatctcgagaccctgcttcagtaaaagaacccaagaactttgccaccaacgttctttctcctagcttcttcatgatccatgattcccgctgaggtcgtcagaacaatgaaaccaaactgtctggaaggaagtagacgagcagtccatccttcaatctccttaacaccgacatcgaaacgaggactgataactccacacttgttcagccttccattaagctcaacaacaatcttaccagacctgtggtcatcaacatactcaaactcgccaatgtaaccgtgcttttgcatgacgataaggaacttgatgataactttagaagaaggcctgatcataacctgcctctttcctctcttctctgcattgtacatactcttaagaccatcattgagcacactgattctcaccattcttcaaaatttcaaaaactgaaacctaagtagtagccgccgctccgacgtctcttgctcg

SEQ ID NO: 451 - DNA, 664 bp, Arabidopsis thaliana
  misc_feature (1)...(664): n = A,T,C or G
cttttttttttttttttgcagaaacagttaagaaacttcaagtattagagacaacaccaaaaggttttaaaggatccgtacaatgagctctcttcagactctaagaaactaaattctaaagaagctgaaatgtgagagttgagcatatgcgcggataataccatacagccccgagtcttacttattagaccaatgaaatgctgctttcacctccgggaggtttcctcacgccgccaaagtagtctcgggactctgactttccgtctgcgaaaatgttgtttccgctcatttcacggagtttagctgagcttaactgcttatccgcactaccaggtgattcatcgcctttgaaaatgccgttgcctgtgagttcctgaaacttctggttatgtatcttctttgatgtcttcacaacaggttcttcactgaatagtatgttgctttgtcctcctgcagggttggaaactttaacagaagtgcgtaagttccttggtgcaggctctcccatgnnnnngttacctctagcttcttgctgtgcagcaaccaaagannnaggctgaatctcagatggaggtgcaaagatgtcatgaccgctgatctcttcaannntagcacttgatatctgcttgttgctctttaaatccgcctcggttagcaagttccc

SEQ ID NO: 452 - DNA, 664 bp, Arabidopsis thaliana
ttatcattaagattcaagattgattatcagagactgaaataatagcttgtagatcggcgagacactccgccggaagagagaggaacgtgttcataaacaaatcgtcgatggtctcaactttcgcgacgccgacgagtctacactttccttcttcgtccagtctctctcctttccctctcttgttctctcctatcgattcctccgtcgtcaacacagttctcaccaccaacgccggagctctgtatatccctcctcccgccgtgaaaaagaacttcgccataaactccaattccaccttcccggattcttggttgatagttccttggaaaatctccggtgagatatcgatttttagaaacggtggcaatggaaagccgagaaacttcgtggtttggctagtgagagaaggaatataaagagtggccacattgaaacaaacagacaattcagagtttgatgctctgtttttgtcgtcgattttcttggcggttccggcaccagagccacctagaggagagtattcgaaatcgggatatctggagatgccaagcttacctgttccaatagtcttgaagctgacactgtagagagtgttgggaagctgtgttgtgttgggttttgggtttagggaatttgaaattagtttgatttggttttgggattt

SEQ ID NO: 453 - DNA, 663 bp, Arabidopsis thaliana
tttttttttttttttctgtaacaaagtctctatattgcgtgccttgtttattgatcattctcaataaagatacatgaggaaagtgttagaaaactaaaagatcataattaaatagtactaatgcttggcgtaagagacttcctcttctcgaatgtttgattgtccatggacctgtaaactaaaagttttttgctggaatcacagaaagaaaccacgtgatagcatgttagaaaggaatggcaagacttactttctaatcaagcaacatgttgtttgctggcttatcacgtactagttcctcttcttacagtacaacaaaattaccgtaccagcatttgtgtatcagaaacaaagtatgtaacctgtgtagatcaatgaagaaaatgcctgcttttctctgaagccatacatattgcaaaccaacaatttcgcacgaagctcgctgttataaagcagagtgcagctgtgtcaagtcatatagagaaactaggaccttccaaaagtgtcagaaagagatcagactgtcaagtatcatgtatatctcctcagtctccggatgtgatttgtcaagagagtagaactgatggacctcgttatcgatctcaatccgactccagcctggtggtttataagcattttggtgcttgatcatctttctagctc

SEQ ID NO: 454 - DNA, 663 bp, Arabidopsis thaliana
tgttcactatatcccctgcgatttgtgtttcccacaaaccctaattttgcaagaagaggggtttcttctaatttatataaatctcggttctttttgccatttcgttttctctgatcatggattctgaagaagacatgctcgatgcgcacgatatggagtctggagaggatgacttctacagcggtggaactgatgattgtaatgatagtgatgatggtgaacctgattatgggtttgttgaggaagatgctgatgattctgctatgatcgcctctcatcgctctcagaaaaacttttgtgttctgagggaagaagatattcgcaggcatcagatggataatattgaacgagtttccgttgttctctcgataactgaggttgaagcgagtattctacttcgtcactttcactggagtgtcggtagagttcatgatgagtggtttgctgatgaagagagagttcggaagactgttggcatattggagagtcatgttgttccaccatctgatgacagtgaacttacatgtggaatctgtttcgattcctaccctcctgagaaaatcgcttcagtttcttgtggccatcctttctgcactacatgctggacaggttatatcagcacaaccattaatgatggcccgggatgtttgatgctaagatgtc

SEQ ID NO: 455 - DNA, 663 bp, Arabidopsis thaliana
  misc_feature (1)...(663): n = A,T,C or G
aattctcaagtctgatattataagagtagcaaaagtgagagacaaaaacgaaaataacaaggtttatgttttgcanatattcagaaatgaacatcaactactannngtagctactagcagaaaagacgcagagtgagaaaagatggctttaagctcttcagcgtttgccaccaccacctcccaccttaggacccttggatgcagcagcagctttggggaaattagccttgaccttctgttgcttagaagcaaattccaccttcttagccttcttttcatctttggtctttttgattctttccttgatctcacgcagagcagcttccctggctgcatcacgaacttcaggcttctcagctctcttcttctgaattacttccaaggtagcaccaacaatggaccttgagtatggcttcttggtggcacgtctccttctcttcacagcctcttgtgctgcatccttcttgtgttgctttctgtacatggcagtccatgcaagcttggatggcttcaacttgttatggaagtacctcttacattttgagttaagaaacaagaaaacctgagaatcagatcggataaacctaattcctcttcctgggtaaatcttctgtccactgaaacgacaaagctccgtcttgagaaccatggtagtagctgctc

SEQ ID NO: 456 - DNA, 663 bp, Arabidopsis thaliana
  misc_feature (1)...(663): n = A,T,C or G
aaaacagagtaaaagaagaagaaaaaaaacggaggaggaacagttagcgccgtccatggcgggtcttcagagatccaccatctctttccgtcgacagggctcttcaggtatagtctgggacgatcgtctcatcgccgagctaagccaacaagcggccaacgaccggaaaggcgagactctacaacaggacgaacaggccaagctgattacgtcggaagtacaggatcagacaaccaaacctatcgccggagaaggactcaaacctatcagaactgacggaggtatggagaggagtcgatccaacggaggaggagccatccgccaccatcgaaacacagggagagtgtctccggcggtggacccgccgtcgccgagactgtcggcgtttgggtgctgctctgccttcgggaagaaacagccggggaagaaggttaatcagaggaaaaggccagcgaagcgtagatccagataggcatgaactaaagtctaaagtaaagaagaagaacacacacaaagatgagaaaacaaaacaaaacaaaaagagagtatatatacttatactgcttcttatgaatctttttctttctgtttttgtttgtgttnttttgtttgtgctttaatgttaaaactgtttaaactcagagactatatatatgtttatat

SEQ ID NO: 457 - DNA, 663 bp, Arabidopsis thaliana
ctttttttttttttttaaaaaagctcattaactattagagtccaaggttttattacatacagaagcgtcttctagtacttgtaaacacatatctgttaactcaggatgacctctaagccaaagtaggaggataaaacaaaaagtagattaaagtttggctcaattcttattcaggagctgctaaagagattgcataagagattagataatctttaagctccccagcctctgagaatggtagcttgagccacacgattaacaccgagtgtgaaagctcccatccggagatcgcaagagtgagttttgcacatctctttcaagtccttgaaagagcgagtcatgtaagtctttagctcatcgttcaccttctcttcctcccacataaagccttgaatgttctgaacccattcgaagtaacttacagtgactcctccagagtttgcatatatgtccgggagaataaccacacctttcttacttaggatctcatccgcgtccggatcagttggatgattagctgcttctatgatgaactttgctttaatctcattcgcattctccctgttgatgacaccaccaagtgctgcagggacgaggatatcacaatcctcaaccagtatggagtttggatcgatcggatctgcaccatcaaaccctttgaca

SEQ ID NO: 458 - DNA, 663 bp, Arabidopsis thaliana
  misc_feature (1)...(663): n = A,T,C or G
cctttcttttacacaaaaccaatcccactccctttctcatcatccacacaaagtagccggtaaagcaaannagctcttatacacaaagaaagcaagaattgtcccaaaagaaaactctcatacatcactttgctgnnnnnntcttaacttcgttattcgtccagactacttgctccagagaattagagagcttcttatagaacttgtgaaattcgagagtgtctcctttcgacttcgatacttgaaccatatgaagacttggcgctacttggaatatctctgtcgctacattgagattcccctttcttccagccttcacattctcaagcctcatcttgtagttcttcttttgaacatcgaaaccgagaggctttgcagcttcttctatcttctcgatgatctcattcgcgcctcctctcaatgttatccttgtttccctcttaaattcctgttctggatcaaacagattctctaggttaagtccccttgacattgaaatgatctcgaaggcattgatcgccgctggctgttcttctctcttctcagtaacaagatgttcctcagagtccttgaaaacagcatcaatatcgtccatgtttgaatcatccctctcctcgaaaacaggtggcttgtaatctttcttgaaccattcatcttcgaaaa

SEQ ID NO: 459 - DNA, 662 bp, Arabidopsis thaliana
  misc_feature (1)...(662): n = A,T,C or G
tttttttttagataataatttgcattcattcatagattagtaccaagtggttacaatctaacattatagtcttatnnnacacgattatattaatactatttcataattannnccctaaggcacatctatacaacgatcatcttagaaaaatcaggccccaaaatccataattaattcttattagcagataaaatacgagattagtaaataaaataatatgaacacactaagatcccttcctcttttccttggaagatatccaaaaaagccaatgagacttcgaaatacggtcagatttttttctttacatgagcaggtcagatacccacccgacatcaggagcctcacccaaattctgatccggatcctgggcaactcgatccatgcaattctccttgtgcagtttctcgcgcatcttttctcgtagctcacgacccgactcaacgacacgctccattacgggttcttcctccaaaccatactcccaaatatccagattccctggtcgggtcggtgttgtaggcagagactgaaacccaggacccaagatcgatccacggggcgacccgaatccgaataaaggattgttacgaggaaatgattttaccgaattaaactgtaaattcctaaacgaaggaacgacgtcgtttatcgaacaagac

SEQ ID NO: 460 - DNA, 662 bp, Arabidopsis thaliana
attcgggagtcaaagctgttgaagtcgagcctacgaacgattacggaggtggtggtggaattggaggtgataaatttggcggcggtggtggaggcggcgatggaaatgacgacggaggggaagacgataaggaggagagtgacgggaagaagagcacgcctctgtctatgtcgcagaagttgactcttggttacgcttttctcgtcggagttggtgggctgatgggttatctgaagagcggtagccagaaatcgttgcttgcaggtggactgtcagctgctgttctgctgtatgtcttcagtcagctcccaacaaaacctgttcttgcatcaaccgttggtgtagtgatggcgggtgcgttaatgtacctcggccgcgaccggcgcgccagaatcgagcggccgcccgggcaggtactttactcttctcaagcagaaacagattgaactccacaaaccgggagatcatgttcaaagtttggagcggcactgaggattggattgcgctcgaaaaagtttacgggcttcaaatcgaaactcgaagaaaccgtgggcattatcggaaaatcttcttgacatggaatgtgatggaaaccaagtgtataccacacaactatatccttgttctctatgtctctatccctgtctgaccaaactgcaaga

SEQ ID NO: 461 - DNA, 662 bp, Arabidopsis thaliana
  misc_feature (1)...(662): n = A,T,C or G
attcattcgttctatggcttccattgctgcttctgcttctatttcccttcaagctcgtcctcgccaactggcgatcgcggctagtcaagttaaaagctttagcaatggaagaagaagcagtctttcttttaatctccgccagcttcctacccgcttgactgtttcctgcgctgcaaaacctgagacagtggacaaggtgtgtgcagttgtcagaaagcaactctcacttaaagaggctgacgaaattactgctgccaccaaatttgctgcacttggtgctgattcccttgatacggtggagattgtgatgggactagaggaagagttcgggattgaaatggcggaggagaaagcacagtcaatcgccacagttgagcaagcagctgcgctcattgaggagctcttgtttgaaaaggccaagtagaatatctttattacattagcaaaaacgaannaaatcaannnccaaaccactatcttattgtttcgttagctagagagcaattgtgtctgttgaaagattttatgttattttggggaaattattacaaggcttgtatctgacttttatctttcttctaaaacattttactttcagccttcatcaaactctcttacgaaacttatgtagtctcatttcctaaataaagatgtttttccct

SEQ ID NO: 462 - DNA, 662 bp, Arabidopsis thaliana
cttttttttttttttttttttttttttttttaccagaaagtactaatattttaaaggtgaaagtaaaatgtttcagacgaaagtaaatattaaaatacaagccttgtaataattatccgaaaatagcataaaatctcaacggacacaattgctctctagctaaccaaacaataagaagatagtggtttgggttttggtttttttcgtttttgctaatgtagtaaaggattttctacttggccttttccaacaagagctcctcaatgagtgcagctgcttgctcaactgtggcgatagactgtgctttctcctccgccatttcaatcccaaactcttcctctaatcccataactatctccaccgtatcaagggaatcagcaccaagtgcagcaaatttggtggcagcggtaatttcgtcagcctctttgagtgagagttgctttctgacaactgcacacaccttgtccactgtctcaggttttgcagcgcagtaaacagtcaagcgggtaggaagctggcgaagattaaaagaaagattgcttctgcttccatagctaaagcttttaacttgtttagccccaatcaccagttgacgaggacgagcttggagagaagtagaagcagaagtagcaatggaagccatagaagaatgaatcgtagag

SEQ ID NO: 463 - DNA, 661 bp, Arabidopsis thaliana
  misc_feature (1)...(661): n = A,T,C or G
aagtagacccaacaatcgaaattaatactagtttatagtgatcagaacagaagaggagtaagagcagctaagttgttcgatacttgctaacgtttgataaaccaaacaagtgcattttttttaagttattattttattccgatgcgcaataacatatcctttgctttgtcttatatcatcaacccattgcgtacttttgtgtccagcttctcgcagttgactcgtacttggacctatctgtcttgtacatgtgagctatctccggcacaagaggatcatctgggtttgggtcagtcaacagcgagcaaatcgacaacagaaccttggagatagtaagagcagggctccattgctcttnnnnnatatcaaggcaaatacttccattgctattgatgtttggatggtacaccttagtcttaaaagacacctttggtggcttgaaaggataatccggaggaaaatgaatagaaaccaaaaacactcctccggcatacggactttcaggaggtcccatgatagttgcttgccaatggaacatgtcctcagccaccggaccagcgctgcagtttgaaggaggatccttctgcagatccttgagctccttcaagatcctcttagaagccatgcgtcagagacgagaaaacctggaagaaggacggac

SEQ ID NO: 464 - DNA, 661 bp, Arabidopsis thaliana
acgatatataatttccttagagagaactggaagattgtaagatgggtagctctaggagcagttgttttcgaggctttactcttcttgcttgcccttatggtcagggcagctaatacaccagcagagtatgacagtgatgatgaatatcttgctccaaggcaacaaatcaggcagccattcatcaaccgccaagccgcccctgtcactggtgtcccagttgctcctactttggaccaacgcccaagccgcagtgacccttggagtgcacgtatgagggaaaagtatgggcttgacacatctgagttcacatacaatccctcagagtcacaccggttccagcaaatgccagcgcaaccaaacgaagaaaagggccgatgcaccatcatgtgagtccattttaaaagtcttgaagagttcagttaattctcttttcctgtgtctttattatttctgcgtgtaacaatcaagagtgtcagtaaaagtaggattcttgtttctgggttgatgatgactctagcatttgagatctctaatcaacctagtcacggtctcaaaactcatttgttgtgtctgtgtagtcttttgtaaggattcaccattatgaatattcatcttggttcccagtctgatccagtcctatgtttcttattatatataaaaa

SEQ ID NO: 465 - DNA, 661 bp, Arabidopsis thaliana
  misc_feature (1)...(661): n = A,T,C or G
agataaagtcgcaccatgttacaacgtttgttatatagctcaaacgcaataaaaactccgatganattcgngttattttcggaaggtctcaaaaaccatttacagtttagaaagccagagctcgagttgttagttttctttaggatgtaactccatatggaagcaatgccgcagcaacgactcttccttcttcattcagaatgttgtacgttgatgcagcatttctagaatcaactgtttctagtttcatgccaagggacttgacaaactgacggacctcgggagttaccgggtgaatgtctcttccacaaccaacaatcaagagctctggaataggtcgaactgtctggaagatagacaagctatcagtggtgatctctgaaaatttacgaggactccatgacattaacagattcccaacacagagtaagctaccttcgtatttgactccattcacagtgaaactcgtatcattaaattcttggaagcgaagctggtcttcaggaacattgtcaatgagattgatctgatcatagagggaaaaagctcgtctcagagagggcaaaacaggattagaatgcttcggaacttcttttctcatactttgaatcaatttcggcaaagtcgccattgatttcaacctcatcgccatcttcgtggc

SEQ ID NO: 466 - DNA, 661 bp, Arabidopsis thaliana
  misc_feature (1)...(661): n = A,T,C or G
gtacctcttcaaagaaggagtttgctttgcgaagaaggatttcaatcttgctaagcatccgttgatcgatgtccccacctacaagtgattaagcttatgcagagtttcaaatccaaggagtatgttagggagacatttgcctggatgcattactattggtttttgaccaatgaagggatcgagttcttgagaacttatcttaatcttccatctgatgttgttcctgctactttgaagaagtcagctaagcctggtggtcgtccatttggtggcccacctggtgatcgctcaagaggacctcgccatgaaggaggagaccgtcccaggtttggtgaccgtgatgggtaccgtgcaggtcctcgagctggtggtgagtttggaggtgaaaagggtggagctcctgcagattaccagccatctttccaaggaagtgggcgtggttttggccgtggtgctggtggctacagcgcagctgcaccatctggttcaggtttgccttgaaaaagaaatgtctttaggtgacagtaagaccatggaggagttttcagctttaaattttgcttttgtaattcagattccggaatccttcataatctctatctnngtttagttttgttgttgaatcaaacatccgatttaaagttatgttcattccatcttc

SEQ ID NO: 467 - DNA, 661 bp, Arabidopsis thaliana
  misc_feature (1)...(661): n = A,T,C or G
ccaaaattttaaactgttgtgagaagaaaaaagtaacccaaacaatttcaagagaatatgctctactactgtttacaaacagatgttgattacaccgantagctcagacttgttcttccaactcgtggcaatctactcggtcttaaaccagtttgtttcttcatgtggcaatctcatcgacctccgaatggaagacaaaactcggaaacgttgtcgtaatatccctgagatatggaagagtcatgatcttaagcaatgatggatttttgtttacgaaatcactccactctaatttatcaatttttccatcttgattcacgtctgcatcttcaaatgtcttatcgagtattatctctatggtttcatcagccagtttcatttcagattcgcagagaagcgcgatcaacatttgcttgacctcttgtcgttcaatgtaacccgtgcagtccatgtcgtaaagcctaaacgtaaaatctatnttgtcttctagagaagcattggggtggaaaacattgagtgatcttacaaagtccccgaaatcgatgactccttttcgtttaacatcaaacatatcaaatatcctattagcaaatatattctccctcttccggcttttgaacaaagcaagttgaaactcctccttgttaatcagaccatcatc

SEQ ID NO: 468 - DNA, 661 bp, Arabidopsis thaliana
ccacgcgtccggtgaagtaagtttttgtttttttcattcttttttccaatcttgagtttgttcgtacggatgtacgttcaaaagtaaactcatctttacattaatcttacacaagaaagctacaagggttaatacaagccttgacctgaaggtgcttgagcttcagatacagaacttgaccacacattgacgctggattgtatcaatgttaaactgataagactgcacagagtaaacgccaccggataaaaccgatgcacaagaacgatcagctgactcatgttcttgatgactgcagagacattttgaacatctagtaaccggaaagataatgactttttaatcgtctcgagttgggaataaagttaagacagttctccctccattagcgtttgcagattccaaatcctcaacgtaattactaactggactatgcaatgatggtgtagacattctctgaattggttgctgctgcgtttgcctcaccgccaagaacgaaggatcaaacttcccattagtcgtcggtgatccaaatccattactagtcggtgatccaaactgtccattactcgtcggtgaactgaatccaccattagtcggtgaaccaaaatgcgcagctgcgatttgacggtggaactgaggcggttgtaaatgaggatta

SEQ ID NO: 469 - DNA, 661 bp, Arabidopsis thaliana
aaactttaaacaatggctggagaggagttgttgaaactgttcgagcaaaactggtcagagaggccaatcttcaagaaagacaaagagaatctgaatggaaaaagtagagagaagcgtggagaaaaagagattctagaggaacgacgagaagaagaagcactgaagaattttccggtgagctttcttgtagagagggctatgagtgacgagacgatgatgacgacgagttccaagacaagtttgtttagttcttcatcagatgatttgttcttgtctcctagatcggtcttacccgttaaaccaacgccgatgaagcttcagacgatcctctccggaaaagaagtcaacgcgttcacgattgcggaaagagagagactactttcagagaaggaagagcagaggaagaagaagaagaagaagagtaatgtgagaacaagaaagggaaagagtatgtcggatttggagtacgaggagcttaaagggtttatggatctaggttttgtcttttccgaggatgaccataaagactccgatctagtttcgattcttcctgggttacagagattggtgaagaaagatgatggagtaacaaaaaaaaaaaaaaaaaaaaaaaaaaaaaaaaaaaaaaaaaaaaaaaaaaaaaaaaaaaaaaaaaaaaaag

SEQ ID NO: 470 - DNA, 661 bp, Arabidopsis thaliana
  misc_feature (1)...(661): n = A,T,C or G
ccacgcgtccgaattctttcatagtcttatggctactaaattcatcaccctcactcaaatccaccgccctaaaaccttactatccaccacaaaatctcgtcgacgcaataataacaaacccaaaccatccaaaaccataagcgaaaacatgttgaacaacgtcttttctggcaaaacgctaacagaaatctaccataataagataaattcacacccacttactaatccactactgtttcttgaagatcagttcgtaaaagaagaggagacgaatcaacaagaacacgggaaggtctcgaacaaagatggtaagtccataaccgcgaccaaatacggagatttgaggcgtgatgttgctcgattaagcttgttgtggtacatgaaatgttccataagccatatattaaggaaggcaagagcgttttacaatgagttttgttgtgatacttatgctgagagtaacactatggctgtggtagagccatatttttctattccggtaattaattaannnnnccaaatcgacgtaannnaaaattgtatnnataattagtaaaatgtttcattagttttgttgtgttgtaatgtgatgtgctctctatatatgtcatatatgtgtaaacaagacgtcaagttatgtaattaatgttatatgaaaact

SEQ ID NO: 471 - DNA, 661 bp, Arabidopsis thaliana
attcgcggccgcttcttcttcttgtgaccactcttcctgtctgttcactggaggtgaattttgatttttttggccgatcggatttgagtttttgaatctctgattgctgagaaaatgccggcgttttacggaggaaagcttacgaccttcgaggacgatgagaaggagagcgagtatggttacgttcgtaaggtttcaggtcctgttgttgttgccgatggtatggccggtgctgctatgtatgagttagtgcgtgttggtcatgataatttgattggtgaaatcatccgtcttgaaggagattctgccaccatccaagtttacgaggaaacagctggattgacagttaatgatcccgttcttcgaacacacaagccactttctgtggagctcgggccaggaatattgggaaatatctttgatggaattcagaggcctttgaagactattgcaagaatatccggtgatgtgtacattcctcggggtgtgtctgttccagctcttgacaaagattgtctttgggagttccagcccaataaatttgtcgagggagacacaataactggtggtgacttgtatgctactgtctttgagaacactttgatgaatcacctcgttgcccttcctccggatgccatggggaagatcacttacattgctc

SEQ ID NO: 472 - DNA, 660 bp, Arabidopsis thaliana
  misc_feature (1)...(660): n = A,T,C or G
tcagtactcgccgaagaggaagaagaagaagatgtcttggcaatcatacgtcgatgatcaccttatgtgtgatgtcgaaggcaaccatctcaccgccgccgcaattctcggccaagacggcagtgtctgggctcagagcgccaaatttcctcagttgaagcctcaagaaatcgatggaatcaagaaggactttgaggagcccgggtttcttgccccaaccggactatttctcggtggcgaaaaatacatggttatccaaggtgaacaaggagctgtgatccgagggaagaagggacctggaggtgtcactatcaagaagacaaaccaagctttggtctttggcttctacgatgaaccaatgactggaggtcaatgcaacttggttgtcgaaaggctcggggattaccttatcgagtctgaactctaaaaccaaggtttcatttcaggttcttcttaactaaagagtgtcaatgcactttttattgtgattgattgtaatgcnntcaaacacaaatcatttgttactttagaaccaattgtgattgattggtctccttcgttaccgagtttgagtttgtgtgttcttgtaatgacatttgatcatcttttttctccatatgtattgagttttgatttttgtttcttcaaaaaaaaaaaaaa

SEQ ID NO: 473 - DNA, 660 bp, Arabidopsis thaliana
tttgaagaaataatccgtggatacacaaagtaataaattcaagaacatagcctacaaaagcaataatactcttttaagaaaatacataacaaataatggtgttgttaatggttggaagagaatgaaatcagcaaaagatgtaaaatgcaaaagctaatgggaaaattataagattgagaaaaagagaataaggtgcactgcttggtgcatcgctccctctactagccgaaggacccgacccaaatcctcctggtgattctgcacctgacatcgaacctggagcataggctggggaggctccctcgtctcccatagctacaggtgctccaacaggaattccaaaaagagaacaaagtgaaggatcgggagtgatcacgccgcaaactccgggaagtttgagagcctttgccttatcaatcttgattccaagttgtgccgccatgtcaccggagaggaggtaacataagcattgcggcgagctctccactagccccgctagcgccggacaacacgtcttgtccggcttggccgcaccaccaccttctccgaccgtaacgtacgagagacagcctgtcatgttcattaggttcgccatgcagtctggtgcacccgatggtcctgacgacggagacatatccatttgtgctgacacatgtcctg

SEQ ID NO: 474 - DNA, 660 bp, Arabidopsis thaliana
tgtggagtcatttgctgcgtctgcaatgggtctaactgttggagctatggtcccaagcacagaagctgcaatggccgtgggaccatctctcatgacagttttcatcgtatttggaggttactatgtcaatgcagacaacaccccaatcatcttccgttggattcctcgtgcttcattgatcagatgggccttccagggactctgtatcaacgaattcagcggcctcaagtttgatcatcagaacacttttgacgtccaaactggagaacaggcgctagaacgactgtcgtttggaggaaggcggataagggagacgatagcagctcaaagccggattctgatgttctggtatagcgccacgtaccttctcctggagaaaaacaagccaaagtatcaaaagctagagcttcttgttgacaatggagaaactggtaattcaggagtccaactggataaagcagaggttgatcaaacggagaaacctgaagacgatgatatcaatcaaccacttgacgatcaaaatcaaacatcggattcggatgatgagcttgacgaaatccgtccctttgtcctcgaaggtagcaaagtgtgagaataaagggattcgaataaaagtggttgctcctcttacctctctttgcctttaaaccaatgtaagac

SEQ ID NO: 475 - DNA, 660 bp, Arabidopsis thaliana
aaagcaccgggaaacctcttaaccggttttggtttctacaatccgttttggctccttgacgtggctaacgctgccatagttatccaccttgtaggagcttatcaagtctttgctcagcccatcttcgcctttattgagaaacaagctgccgctaggtttcccgacagtgacttggtgaccaaggaatacgaaatccgaatccctggttttaggtcaccgtacaaagtcaacgttttcagagcagtttaccgaagcgggtttgtggttttgaccactgtgatatccatgcttatgccgtttttcaacgacgtcgtagggattttaggtgcgttagggttttggcctttgacggtttactttccggtggagatgtatataagacagaggaaggttgagagatggagtatgaagtgggtttgtctgcagatgttgagctgtggttgtttgatgatcacgttggtcgccggagttggctccatcgccggagtaatgctagaccttaaggtttacaagccgttcaagactacttactaaacaaaccatgatgatgatgaagaagaagaaggtggtggagaaaaaaacaaaagatataaattttaatatatttcatttggggaaatgtgaataatgtaaaagttcttcgtttcgtataaaaaaaaa

SEQ ID NO: 476 - DNA, 660 bp, Arabidopsis thaliana
tcacacattaatttgtaaaagaaaaattgttcatttgagaacttacaatgagttttacacacaaatttaaattagacagacataaaaccacttcacagacaatcatttggtaaaattattcagacatgtaaaaaaaaaaagactttatggtaagaaaaaaacagaggactatactcttaacatattggaatgggagctccgttccactcgttgagacattccatcatcggatcaatgattttaccttcacaaatcgccgtgaaaaccttgtcgaactcttctccaggcgacgtcactttctctccggtcaaaagctctgttccaagctcttccctcacgaatctatacaatggatacgacctacattccttgatcctgttcgggatagccgatgttccgttatcgtaggctgctcttgctgcttccacttctttcggtagcactgccttaagctcctcctcgaaagctccaatcttatggaagattgaagtcactgcattcttctcactctcaccattgatcaaagcatggtcaacaataacttgtctcagcttctgaatcaaggggtacgttgcgctacaaggatcatccgcgtatgtgtagacttgttcacggtctacaactttgagtaaatccttttcgcagaagcgagaaggatga

SEQ ID NO: 477 - DNA, 660 bp, Arabidopsis thaliana
ctttttttttttttttttttttagtaaaaagacatttatcttctttcaataataaagtactcgtagtacaactaaaaatcttacacaacaagctccaactgtcaaaacctcaaaaattgaaaaacttcatcaaagtctcctaacgagtctacttaacgaggaggagagacaggcacattagctttcgcgaaactgatccaagcaacaacaccaatggctagaatcacccaacccatagcatcatacttggcatcactacttttcttattcttcactgcctttgagctcggcggtgctggagcttcaacgcgacccattggttgtgagcctaagccttgtttgtaagcttctgcgtgcagctgtggagccttggccgtcatttcgagtgatttcaggtagtgtgtattatctggttgctcatccacagcttgttgaaagaactgagtagctaagtcaaagttatgtttagcttcagtctcgtcaggagtcagaaacgcaaatgaagtgtatgcattcccaatacaccaaaccgcttcatctttctttgggtcaatcaacaatgcctcttcaaactttgtgatggcctcttgaatcatttgctttgcatctgagatgctatgaaactgagataactcgagtaaaactcctccccatctagtc

SEQ ID NO: 478 - DNA, 660 bp, Arabidopsis thaliana
  misc_feature (1)...(660): n = A,T,C or G
atgaaacaaaaccagagcaagttcttgagaataatctcaacacctctaagagctttaggcaaggcacgtgatttctacgtgagaagcatcaccgntngcgcagctcgtactcaatattcctcctccgcctccgtctccnctccttnnccaagaagccggagctcctcctccnnngccttctcctcctccgcatcatcccggagaaccaccgatttcgggatagatgaagattacagcgagctagtgagagctgcgtcggtgaggagtttagggcacaagaatgagatagacatgttgatacaagagaagctgcaacagcagaagcaacagaagcaaggagggttgcctaagagctcgagtgctgggatggcgaggatagaggaagaggaagaaacagaggaaggatctgtgaatccgaaggtgaagaagactaagaaagtctctgatcttttgtatcctcgtagcaaatcttacgccgttactactagtacccctatcttgtaacttctcttcttcttttttcttcttcttaattttagtattttgtggattgattatcatttttctagctcgatttttcgtgcactgtgaaatactattttcttagcttgattttaataattttgtggattgattagaaataaataactaaacctactc

SEQ ID NO: 479 - DNA, 660 bp, Arabidopsis thaliana
aataaactacgaacaaacgcatgcccaagaagagcccaataatgcatcgtttatagaagaagattggatcaagaaagatcaccaaaagacacgtgtaaggtgagcaaaagaaagattcccatcgtcatctttcgccatcggagatacggtttttcagtgagaaaccacgtcgtaacgaaatcgttggtagatcatctgtttttcaccagtaatagcaaaacaacaccatgaagatacacaaaaataattagactcaataagagaataaaatccaatgcacggcttgtcacttttaatagtagcttatgaacttagatgtaatgattaacgttaaatgtttattctagtactaaaaaaagagtaaaaactctgccatgcgacatacacgagactccaaaagattcaccgtcttctggcgccggtgtagctatgtctccccggcgtcgaattttgtcttctctttgttgctccgctcctctcccgcagaatccaaactggtttcgcctcacgtataaagtctttcgtttgtcctcttcgtttccttccgatgtgtcttgttgtttgcagatctggtggtttctcttctcctttgaagatctgtaggtctcttgtttgacgtcctccacctctctatggaaaatccaacaactacttcgtgtt

SEQ ID NO: 480 - DNA, 660 bp, Arabidopsis thaliana
gcggccgccgaaagccttccttctcatgtaatatatctgttctagttttatcacataataactaactgctatagcttataatatggtcactgatgtgtttgtgagcaatgccacagctacaggagcatctgtcctggtattcaattctgaaacatagaatccgggagttggatgttcgaattttgtcagtctaccctttttgctctatgttttattcagtaacttttaatgtgttttctatcccacatgaaaagaatttgttttcactaatcattttttctattttacaacatctaaactgctactagaatagaatccaaaagtttgcccctgttattgtatacatctcattaacacgaatctttgttttgttgacattgttaatttttttcaggtgtgatgtttcttggagatcttgtaccctgatttcttacatctttcttgttggaagtttgggactcacatcctaacccttgctatgctgttgtgaaatatgcagagattcaggctggaagctccctgttcagacaattgcctttgcagaaaggccatgagaattttattaatgttactgataataattgctgctcttttgtaggactactagcattatggcccctgctatgcagggtcatagtatctggcataaaagcggccgcg

SEQ ID NO: 481 - DNA, 659 bp, Arabidopsis thaliana
ctttttttttttttttttgataaaaaccaagattagttgagattgagagctctctgtgaaacatggagcagagtacacatttgattgaacagaaaggttttatattaactcaggggatgaagatgacgacgtccctgataccgttttggttgcatctaactctttgtttccgcctttagtgtgtcgtgagtttgttgttgtctctgatttactaccttttgcaccatcatcctcttcctcttcttcttcatagaatgaccctgaggatctcagttccttcaccttccgaaactcgtcgtaatgtgcttttctgtgtgcgttgaaacgttcatttttaccacttccagaaccttcttcatcttgatccattggatctgcttcttcttcttcttcatcagacgagctccagccaccaccaccagaaccctggctactatttctactggaagaagctgctgcatcattcagaacattcctcagttcttcagctcgttgcatatcatcaacacattcatcaaacgctcttcctctaggagacaaagaaccatcatcatccatcatcgggtggtatggtgtctttggttcagtaatcttctgcctaacaggtttgttcgattcaatctccactatattagcttcatcccattgaacacgccccc

SEQ ID NO: 482 - DNA, 659 bp, Arabidopsis thaliana
ctcttttaacctttatagctggtcgtaacattgtcatctaaagccatgatccaaaggattcaccacttccctactaacatcatttacaacaaccctttcattctagaagaaacgagaggtatataaaccaaatggcaaagaaatagaaagctaccagcgtgtatgaacatatccaacggttttgctatagacaaacccaccaatccaaccgcatcattactcccgacaccaatccaaccgatatgtgacaaactgaccagtcaagctgaattaccagattccaacgcctgtaagataactgactggttgaacttgaagtttatgaaactgccaccaggttttatgtcctgagaatggtcgactacaggctttgtattgtggctttctactgttgctgttgtattgtggctttccattgttcctttcctgagttcaggctttgtactgtggctttccattgttgttctcttgagttcaggctttctactgttgctttccattgttgttgtcctgagttcagactttctattttggctttccactgttgctgtcccgttccctccaacactagtccttgcattccacacgcagagtgctttaaggggcttgttaggtctccgtgctacaggtgaaggatgctttaatatccacgacttcaa

SEQ ID NO: 483 - DNA, 659 bp, Arabidopsis thaliana
gatcaacagagaggggataatgatggtggaaatcctggggaagttgggtatgatgcatttggtggacaaggtggtgttcatgttcctcccttcttatcggatataaacccaccaccaatgctgatgcctgttcctggtgctgggccactgggaccatttgtaccagcaccacctgaagttgctatgcagatgttcagggacccaagtggacccaaccctccttttgaaggtagcgggagaggtggacctgccccttttctgttgtctccggcctttagacaagatcctagacggctgcgcagctaccaagacctagatgctccagaggaagaagtgaccgttattgattacaggagcttgtagacaagacagggctagagagatcccgagtttactggttcgggttgggttaaagggcatcagtattagaaggcaaagctagcagattgtggcattttcttacccttttgatgtattatgtcttgttcctcccaattttcactcactaaagcgtaaaatacgcactccatacatttccttattgtttttcaaaattttcatgtgctttcttactaattctgttcgacgatgattacataaatagcatgagaatttcttgtattgaataatgcgttttatccacattgtttgttatcaat

SEQ ID NO: 484 - DNA, 659 bp, Arabidopsis thaliana
gaaaattctcagctcccaaagaaacaatggttgatccaacggctgttttcgctcttcttttcggaagtgaactattcgaggattatatcggtcacttggctgttgcatcaatggcttccactcaaatggcttctgaaatcgaaaactctgatcagtttcaagacaaactaaaggctgttcagaaagaaagagaagaaaacctttcaaggtttctcaaagattttctgagtcaatatgtccacggagacaaagaaggattcataagccgcgcagaatctgaagccaagagactttcagatgcagcttttggagcggatatgttgcatacaattggatatgtatacacaagacaagcagctcaagaacttgggaagagagctctttacttaggagttccatttgtagctgaatgggttaggaacaaaggtcattcttggaaatcacagattagtgcagctaaaggagctttacagttacttcagctgcaagaagagagtaaccggagattaaagaaagatgggactagtccagcaaatgagttagagtctcatattcagaccaacaaagaaacattgatggatctttgtggaaacttaatgttgtcgacattgaagtgactctgttacatgtgtgtcagatggtctttcgcgaaaaaaaaa

SEQ ID NO: 485 - DNA, 659 bp, Arabidopsis thaliana
  misc_feature (1)...(659): n = A,T,C or G
aaaaaaagaataaggagaagaagaaaagcaaaagcataaaagagagtagcaaagactgagaatggaaagcttggacactaattttcctgtgcgccatagaaaggtctcgtttgaaagtaagggaaacaagacagagattgtgatctgcagctatgaagatcatatccttatcatagcaacacagattggtgccatgggaactatattgcacgcaaggaaggaagaagggatgtctgttgaaccaacatttagtgtttcagtgatattcggaaagcgagacgagccaatgctgacagcaactgctcgaagactcattgaacacataagttctattgttccctcgaagcctctggttctctcacttggtctcaaagatcattcttcggagacgttgaaggaaatagtagcgacagtgattgagaatcnnnnnttggtaatacatattgttnnncatgttaaaaggagaacgagaagatgttttatgtnntagtcttggttgatataattagcatggagttgtggaatcttttcttgtttatactgaaaacattgtttttgagataaaagttaacaacaagtacacatttttttcacacagaaacataattaaacaatagtattttgtttaaaaaaaaaaaaaaaaaaaaaaaaaaaaaaaa

SEQ ID NO: 486 - DNA, 659 bp, Arabidopsis thaliana
  misc_feature (1)...(659): n = A,T,C or G
ttttctcaactcatatgattagtaaaccaagtacaataagttttcccacgttgcaaaacgcaatttgcattaggcacaacaatacttctccgataataactacatatttacaaacttaaccctacaataataactaaatcaccaaactacccttcattcttctatcttactcaacttcnnngcatacttcctcctcncnntaccaccaccaccgcgtcttttcccattccttgtctctccattagctcccaccgccgccactcttcgagcagaaaagatcaccggagacacacatttccgacgacaccgacatttatctcggccacatgaaccaccacttctcataagagcagagctagctttaacagccaatgcagccatttcctcggctttaagagaatgatgaagcgaacttaaaggaagagcgaagtacagttgaccaagctgaaactcctcgtcggcgctaatggcggatacaacgttgtcaaagtccatatcatcggagttacatatgaaacacatcggattcttttgtaacacgtaaccaactttgaccggacttgtgaactccatcatccttccgtcgtgtaagatcagcttcgccgttgcgacttgtgtcgactcgtacgagctgcatatacccattggtttggtttgac

SEQ ID NO: 487 - DNA, 659 bp, Arabidopsis thaliana
gggaaaggcacaagaagtgaattgccaccacctggaagtgttgaagtagtgtgtgcaaaggtgtgcacactacttcacgctatatccattttaatgtgcagtcttaggattattagatctaggaccatgttgttacacattgtcttgtagtagaacgctagaacataaacttcctttgaggataaaggaattgctaacacatgtatattctcggtggctaagctttggagtaatagccacacttgagctaacttagattaagatcatttttaagattcaaaatttagattgctcatcatatcttgaaccaaccccactaatggattgtggggttcttgcatttgcatgtatttttgcctcttgggagatattttggttccctttaggttcttctcataacaatcaaccaaaccagttgaccaaccatggttaggaatttcaggtgagaggtattcatcacctctttatctctcttttttactcttctttcctctgtttcttcaagactaaaaactctcttttatgtaatttgttgttatatcttgtaagctgtgtgtttctgattctatgtaagaaaactaaaacctttcattttccatcctcggtggttggagaatgaaactgtgattgcaatattttactttgatctgataaaaaaa

SEQ ID NO: 488 - DNA, 658 bp, Arabidopsis thaliana
  misc_feature (1)...(658): n = A,T,C or G
ttttttttttttttttttttttttttttttaaaaagctaaatcattcattatatagagctgcaaatctctcatttcaccatctaaacattctacattcactttttccattacccgtagaatcagtgggagataggtaatagtttactaaaacgaaacatcagtaagaaaaagaaaaaaaaaaaaaaaaaaaccactttaaccagccgaattaacattttaagagaagagataaaaacatccgagagattccttgcagccttctatattacgctaccacaacttcaacttcttaatcatcgtcttcctcctcttcactgccatcctcagcatcatcctcatcgttaacctctgaaactgacttgtcagattcctcatcttccttagggccttcctccaatttcttgttgtaggctttcatgttcttctcatactcaaccttgcgcttgtcagccttagccacataaggagccttctcagagtcagacaaggatttccacttttcaccaccagctttgccaacagcagcaacagacttgttcttagggtgctcctccttgtacgtcacacggaaatcttccatgaaaacgangaaggcactggaaggcctcttaggtttgtttggatctttagcagcacctttggctcccttagcaggct

SEQ ID NO: 489 - DNA, 658 bp, Arabidopsis thaliana
cttttttttttttttttttttttttaagcagaagaaagtagatttatatagatgtgaaattacataacacaaacatctcagaacataaaaagagccagatgctcattacacactcatgtaagtaaacaacacacatcgcaggacgtacatacataaaaagcacaatacaacgaccgaatgcgactgcgttacaaaccctcattatttttatttaatatgtatacacgattgttcgaagcttaacggccaccaccgggaagcttttccttgatcttgtccatcatccccttcttctcgtggtgctcaccaccgtagccaccagcatcatatccggatcccatgccgcccatcgcttgagcttgaccagactgatcatgatgacctggcaacttctccttgatcttttgtgttattcccttcttcctcctccctccttgtccatcatcctccgagctagagctggatccagatccggagcggtgaagcattcctcccaagccaccaccactttccttgtggagttgctcttggccgtggtgcctagctcctccgccagttccaaagccttcagtcccggtcccggttccgtatccttggccaccggttccgtacccttggccacctgatccgtacccttggccacctgttccgtatcctt

SEQ ID NO: 490 - DNA, 658 bp, Arabidopsis thaliana
tcgagcggccgcccgggcaggtccgggcaggtggttgttctgtggactagatgggatctactgtatgtttctagggagattgaataatctctgtacattgaatcgacaatacggtttatctgggaagaactcaaacgaggcaatgtttgtgatcgaagcttatcgaacacttcgtgatcgtggtccttacccagcagatcaagttcttagaggtcttgagggaagcttcgctttcgttgtctacgatactcaaacttcctctgttttctcagctctgagttctgatggaggagagagtctttactggggaatttctggagacggatctgttgtaatgtctgatgatattcagatcataaagcaaggctgtgctaaatcgtttgctcctttccctaatggatgtatgtttcatagtgagacagggcttaagagctttgaccatccgactaatatgatgaaggcaatgccgaggattgatagtgaaggtgttctttgtggagctagtttcaaagttgatgcttgttctaagatcaatagtatccctagaagaggaagtgaagctaactgggcgctggctaattctcgttgattttgcttctagtttcgttaactcttgcttctttgttgcgttttctttttatgtacctcggccgcgacc

SEQ ID NO: 491 - DNA, 657 bp, Arabidopsis thaliana
aacaactcaacatttttattctaaatgagacaaatacaaatcagttcaatcatctttgttatcaccggagaagtaaatctcacaagacctaggaagaaacacaggcaacaagagaccaaacagattataaaaccacatcaccgtgttaaccgatgcaatcactcttcctccgtacaatctcaacggaccaccaggacgttgagtgtcggagaattctgctttaacccaatccaaaagagcgaaaatcctacgagcgttgtagaaaaccggtccaagaatacctattggcatcgaatacttgtcagagaaaccaataggttctgtgaaagcttgacctgagaggagaaatagatgtggtgcggcggctccagcaccgtgaatgtctccacggtatattccatctccgatgtaacaaagagggaagagtaggcctataattgcagtggcgaggaagtaagcttgaaagagtttgtttttagggtttgagagtctcttcttctgttctgtttgcttgcgagggaaggcaaatcttgagagaaactcatacaagtagatataacacaagattacaaacgctatttctccgatcccaacgagtccttttgcggctaataaaatcatgaaagagagaaacacaagctgtcttcggacgcgtgg

SEQ ID NO: 492 - DNA, 657 bp, Arabidopsis thaliana
agagattcaaatcggtttcatcactttagcagtgatggagtttgctcatgtggagacttttggtgacataataaatagaaaacattgttcagaacattttttttttacacaattcgagaaataaagcaaattcaatgttttgggaagaaatcaaacatgggtttgagattttgttttgcttctcagtacatacataaggagatggtgaagagactaataataatatgattgtgaaagatgcttgatgggaatgtcaaatctatcaaccttcttctccaaactcctgtgtgaatctctcgtggacatcaaggtcagacttgctcactgttggcctttgtcttgcaagtaccttctcgaaatctgttctggtgattggtggtggaataatcttttcggcaagcccttttgttgctagatcttgcattgtagtctggatggcaccagggtgcctaggcccacatggcatccatgtaccatcaggagacttgaaaaagaacattgcatcttgtgttttacgaacaggttcaaacagaacatcttttacacaaacagacacatctgaaccagaaaacccttctgtcttttggcctaaatattcaaaatcaggttcagttaaattatgaggtgtatctcccaagtggactttgaacatgtgct

SEQ ID NO: 493 - DNA, 657 bp, Arabidopsis thaliana
  misc_feature (1)...(657): n = A,T,C or G
tttgaattcctgctcttaaaggtttttgattgtgcaattttttcggtaacaatggcttccttggagatgaatgacctaaaaaagatagggctaggtttgactggatttgnngtgttctttacattcctgggagtgatatttgtgtttgacaagggactcatagccatggggaacatcctcttcttagctggtgtgactctaaccattggaatcaacccagcaatccaattctttactaaacggcagaattttaagggtactatatcatttggattgggtttcttgttggttgtgtttggatggcctattttcggtttgcttcttgaatcatatgggttccttgtgctcttcagtggtttctggcctacacttgccgtcttccttcaaaggatacctctattaggctggcttttgcagcaaccatacatcagatcgttgctggatcgctaccgtggaaggcgtgtccctgtctaaaccttctttgcctttctttctttctttttgtgtgcgaattgaccactatccaattatgaagcttaacatggcatttagagttcttaacactctctagtctcttgtatcatatttgacataattggactgtacaaaaacaaataccttttgtattttattttaaatttacaaaattttacataa

SEQ ID NO: 494 - DNA, 657 bp, Arabidopsis thaliana
taaaaaaatcaaatctcgattcaatttcgatctaaaacatctcttccatgtaagtaagtaacaaaacgaaattcaaagattcaataaagcataaaaacaacacatcaaatttaacccaaacaaaagcatattttgttttgattaaaatcatttagccatgagtattcaaagcttcccaaaccaagttcttaaccaccggattagccacgtctctagcttgataagctgctgtcttcaaagtgttaatggtcaacacatttgcttcaaaccacgacatactcctatacggaagattatgcttcttgcaaagctcttgaaccaccggagaaactttccggagatggcaacgaggtaagcgagggaacaaatgatgctcaagctgaaactgtaatccaccaaagaaccaatccatgtatgatctacaagagatatcgattgttcccgccgcttgcttctcgaaccagtcgctaccggtgggtggaccaacgtagacatcagcagcgaaatggttaagcgtgaattgaatgtgttgaagcgccgtgacggtgaagcttgtgaagacgaagaagaatctctcaggccagtttggtagacatgagactaagagtgggaaccaagtccagaagactaagattccggcgaagtttaaagcacgat

SEQ ID NO: 495 - DNA, 657 bp, Arabidopsis thaliana
tttttttttttttttgacctaaactatttttttatttatcaccgaaaaataacattttcattttttaatattcatcgtattctattagtacaataaatacaacaatacatgagtcacttgtttttttttgtgaagcctctcttttggttttatcatcagcctcccatgctacttgaagggtaggaacggagaccatgagattcttctgctgtagaatctcttgacgctaacaaattcaccttgactatttcagaaagtgagcttgaccgtgcgtacgcagccaatacactcatattgaaatccctgaaggggtcaccgcgtagagactgaacatacatcatggaaaagtccgagccgtttccctctagagttacatccctaagtcgtcttccagtttgagcacaacaaacacggatcacattctcatcgcagcttccacttatgatgtagtcattaccattcatgtagtatgatcgagtatagttcatcgagcttactcttgggactatctcaaagttcagatgaagccttccatctactgtcaaaagctgcctcacctcgttgtctacggctgatgctagaagataacgatcatctggagaaaagcaaaccattacatttcctttcgtactagaagcggtgtagcatggtcgggat

SEQ ID NO: 496 - DNA, 656 bp, Arabidopsis thaliana
tcctccgtctctcttctccgatcatgtcccctgatcccaaatccaataccttcttcttctctttttccagttgattaccggagaatttcagatcgcgatctccgatttattaataattacagaaaaaaataattaaaccctagagagagagagagatatatatatacatggagagttcattaggtttcatggcggttttcgccgtctcaggaagcgttgtgttcttagcgagtcaatttcacaagcgtcttctctccgattacatggacaagttcgaattcgaaatccgagcgcagaaaaaaatggtgatgaagaagaaggtgagattcgcggcggatgtggtggagccgtcggggaataacaaagagtatcgccggagacattcttccaaggctaaatcgaattcgaagatggcggcaactatttgactttaaggttttttgtacaaaatttaatgtgtaatttattcatttgggtttttgtgatttgaaattcgtaaatttaatttcggaatctgaatctgggctaaacttttcaagtcttccccagggtcaattattttccttcttcttttttttcttgagggtttatttttgttgttgtgacctgtaaataaatgtgttgtttgtgtatatacaaaatgtgattgctaatta

SEQ ID NO: 497 - DNA, 656 bp, Arabidopsis thaliana
ctttttttttttttttgttaaggtttcttgttcattacgttttacaatatgtcaacataccaaaatgaatttagttttaaggcttaacctaaatattcaaatcattcattttccgatgttattgtttggtttactgttttcattggacaatacacacaacacagacctagctcaagcatgtggctgataggagaagccattaacagtgagacctccatcaacacaaatgacttgaccagtaatataagaagctgcaggaagacaaagaaatgccacaagcggtgagacttcatttgcctctcccacacgccccatgggtgtcctttcctctgcttcttttttcatctcctcaacactgagaagatcactaatcaaaggagttgtgattaaccatggacaaatagcgttagtccttatgttgtcgcttgcccattcgcaagctaagtttctagccaactgattcatggctccttttgttgctccatagatggatccacaccgacatgcacgactccggcaatagaggacatgagcacaatgctccctgagccagaggctttcaacaaagggtgcgcaagctgtgaaatatggaaagctgagtcgagatttgtagccataagaaacgagaattcttctgctgtatactctgtggtcgg

SEQ ID NO: 498 - DNA, 656 bp, Arabidopsis thaliana
ctttttttttttttttttttaattgggttaataacacctttaagccgaaatagtagtatcataggatccgataccaaacgaacaagacaaaaaatcaaccaaagggttctttaaccttcgtgaccataataacttagtttctaaagagaatggtcacgataaaaaaacaagtctgcaaatcctaatgccgattactccttaaccattcatatcacacacaagccctaaacctggacgaagtgtcaggccgtagcaccaccaccgctgccaccagtctgatggagcatcgcatcgatctcatcaccatcctccatgtcaagctcatcgggagtttgctcagcacgaagacgacgcccatcaaacaagaaagcaatggagttcatgtccacagattgccggtcacagtaagcattcatcagcttcttgagctgagtgcttctcttgatcctaaagaaaacctcgtttccatcctgtcccttgactttgagattgatgtgagctcctccgtctcctggcttcttgtcttcctcctggtttgcagacatcgtgaaaggttctccgtccggttacaaaaacacgaaatttgagagaacgatgagagattcacacaatcaaagaatgatgctgagagatgaatataaaaagcggacgcgtgg

SEQ ID NO: 499 - DNA, 656 bp, Arabidopsis thaliana
  misc_feature (1)...(656): n = A,T,C or G
gagatacagttatcgtagtgatcagccatgaaccaccttattaataatatgatcttacactttcatggaaaattaaagcttttgtaaaagtttatgatttaagagattacaaaccattagccgctagcttgttgaggagtgcgannnaattgctggacaagtacatagacgtcgtgactctcttccgaatcatcctgaccgttgatgatgacctcgtcgatgtcttttcaaacccatcaagacacgtgtccttgtcagtgagggaagagctaagccacgtagcaagatcactcatctgctgctgaaactcgctggctctgagtgtccggaggacggccaaggacttgtggagactatcaagagagtcttggagaagttcgcgacaatncgacaaagcgattcggtctcgtttcccaatcgttgaaagcctcgttttgagaaggtgtctaaggacgtctttgttgtcggttatggcaacggaaacgccggcacgtgcccatttgctgggactgttcttggcgactgatgcaaacggcaatagcgttttagcgcagaggtcttggtagcgtgtaacactacacgcgttttgaacgtagctttcgcgtttggacggtaatgatgaagttgggttgagagaaaggagaaagaagacgagt

SEQ ID NO: 500 - DNA, 656 bp, Arabidopsis thaliana
attaatgtaatacacataaccaaagatttaaggacaaccttttgccctgtttctgaaacaaaatgtaattaggttccagtttcatatgcttaagaccattaagcatgtttacatttgaattttaccgatgaggtaaataaaggctatgaattggattcaatccaatgaacatagatcttgcccgagaaacccgacaacccaagcacagacagagatttctctgaaccaaaagaaactctatttttcttcaagttcttttgtgtctctgttagatttcttgaagatatatctcatacaccacagcctaaacctttggcttctgatcctttcatgatccttagtctcttgcacgtacatatgaacatctcccatggaacatcaccaatgagcatccaatcaccatctttgtcttcataagtaggcacaaagtctgaacctttatatccatctctctcaaagtactctcccacagagaatttgaacatcacttctaaagctttaagcaactctgagtatcctttgtaacaactcagatctattttcctcaagtatggtgcaccatccatacttactttcacatagattccttgaccctcatgctcagattcattcttcttactctgaatgttgttcttcctgtaagatctgcggccgcg

SEQ ID NO: 501 - DNA, 655 bp, Arabidopsis thaliana
ccacgcgtccgtgcaaagcaatactggagaatccactgataggaccagcttcttacgcagggttgagcccgtgggtttcaggaccagaccttaaagagaggatgattaagtacggaagaacagctcatctttttgctctggttcgggacttagggtcaggtgaggttatgatggaaaacgaagttacatacaggacaaccaagaaagatagagagaatctgagggcaggtcttagacaagctttgcgggtttcggttgcagctggtgcagttgaagtcggaacatataggagtgatggacagaagatgaagtgtgaggcaattactaaagaagccatggaagagtttctagacgaagttgatgctgttggtggggttggcacaaaaggagagtattggacgacgtacttctcggctcaccagatgggtagttgtaggatgggagtcaccgcggaggaaggtgcgttggatgagaatggtgagagctgggaagcagaggggttgtttgtttgtgatggaagtatattgccatcagctgttggggttaacccaatgatcaccattcagtctactgcttactgcatctcctcaaagatagttgactcgctgcaaaacaaaacaaaagtatagagaagtaaaaaaagaaagaactgaaa

SEQ ID NO: 502 - DNA, 655 bp, Arabidopsis thaliana
aaaccagaggctagctgttctttgcaggcgtttacagcgattgcgttgaccagcctcccgacgaggttgatctcttcagctacaggcagtagcctctcgcaggagtgaagaacagtgatcgaattcgatatgtcattgaaaatggagtctttcaggtaggcctctgttctcgcctcgaggttcttctctgacaagtcttctgtcatctccaggtaatgagccacgcatcgcagcgccgcaatgttggacgagttatattggacgccaacgccgtagcagaactttgcagcaagctcgaacgattctgagccgcctggaacagcggctaggttcagggaaaaggtcgcagagccgacttcaatggttaagtcactcgtaacgtccgagacaggcctggaacaacagagagatcagcaacattttgaggaaagaagagatgagttagtgaaagagtaccattgaggagtgtgtctgatactggaacttggacgaaacgctcttttagcagcaacactttgcttattagactcaggaacagtaacaacacccattggatcttattattatctatctcttctccccaaataaagttgtaaacctctttttgtgttactgcaaatatgtttttgtgtttctcccaaaaatgttccttaaa

SEQ ID NO: 503 - DNA, 655 bp, Arabidopsis thaliana
cgagcggccgcccgggcaggtacaagagttttactatccgaaggtcacatttctacgatcccaacaaaacagcgatgagaagaacaataccgacacaaacatttgaacactaacttcccacataacataatgagcagccaaaatgtcataacacaacaaaatggacaataagattattaaaacgaagcatagcttctttaacaaaagacaaacagacaagagaaaggtcgacaatttcttcaccatcatcctcataacttattgttgtaccagtacacacctttcttgtcaccttccctgtccggttctacatagatacactcctttgcctccctatacatcgctacataccacggtgttccatcgaactggtaatagtctcccagaattggctttatcgcctttgtagcttccattgcgttataatgcggcattgtcgagaacaggtgatgagccacgtgtgtgtctgtaatgttgtggaacaccttgttcaagattccgtagtctctgtctacggtagccaaagctcccctgagccagtcccactctgatgaatcgtagtgaggcaacgagggatgagtgtgctgcaagtaagtgatcaagacgaggaacgcattcactatcagaagcggtacctgcccgggcggccgctcga

SEQ ID NO: 504 - DNA, 655 bp, Arabidopsis thaliana
tttttttttactcaaaccataatttatttaaaaatgattttgtactacgcaaatgaaagattcaaacacccatacaagtacacacacaaagggagatgtatgatgatgatgatgatgatgatgataggtgatgacgatggttcgaaagggatttaggctttgagaacatgctcgtccatgtcagcaacaacgcttttgaggaacttcatgtagttgctaggctcaggcgaatcatcggttcgcttctcccaaatcattgtgatcttgcatacgatatcatcgggagacttttggctgaactgatatatgagatcatacactttaagctgctccatgacgtgaccttctagtcctctgaacgttatcaccatattctcatcgtctatctctttcctttccttgaacacttccggtttcccatcgcatgtatagttccaaatcttgatggcttcatgagagtcccattcaccgtcgtggacagtgacaccttggatgtggtggccgatggcatcggggaagaggtggttctcatctctccaccgcttgtagtgtttatccgccgatcctttcaatggaacctccgtcacatatgttcccgatgtcgccatctctttgggtagtgaaagaaatatgttatgtgtgtgtgcgcttctta

SEQ ID NO: 505 - DNA, 654 bp, Arabidopsis thaliana
  misc_feature (1)...(654): n = A,T,C or G
caacataacagaaagctcagttaaaaaactttggcttgagagtttgatccgactaaacataataaaatgtatgttccaaaaagaaactcattacaaacccttccatttgtttacaagatttcagacatctttttttccggtggtgacttttcaggtgtgagctgacgctgcagtcattcccatggatgattctgggctaacgtactcctcgcttgcgtgccgtacaaactcctccggtgacatgtgcgagccgtggnnagcgcatacgatttnnntctggtttgcgttgtaccggtatgtgacacctgagattgtccgtccgtgtgggcctgaaccagtggttgnnnccacggtaagttgggacgtgccccggatcctccaaacttcacatctgctgccattccaggttttatggcagaaaagtcgaaagagaaagcggtattgaggttgctgttgtctcccgttggtcgttctgatgcatcctcggatgaaccttcttctgcaacaggttgtttgccttcgccttttgcagtagctgagtttgatggaactcttccagcaaatggagattgagaaagtgcgacaatccctcctgaaccgtccttatctagcatagggagctggactggtgagtatccgaacataatcgggaga

SEQ ID NO: 506 - DNA, 654 bp, Arabidopsis thaliana
atagcttcttcacggcaaagctttttgtcaaacaatttcagtttccaacacagttttaaacccaaatccaatgttaacctcactcgtcctaattcaatctgttgtaaatcttcacaccacgacgacgaaactgattcttctcggaaaaatgaaaatcagctggcgaagttggcaatcgcgacgctagcggttggcgttttggctttgggaagtgttggggatgcgtttgcggccaaaagcggtggaagaatcggcggtcaagcgtttcggtcttcagctcctcgtcctcctcccagaattaacaatcgatcaaggaccaacatctacgtgaatcctcaggttgcaccacctttgatcggtggctatggatatggttacggaggttacggatggtcaccgttttccttttttgcccctggtcctgcggtggcagtaggtgttggcggtggctttgacctcctacttctcttcatgttttttggagccgcttcagccgtcgctagaaactttttccgatcaagaaatgatgaagatgacgaagacgactattagaggagaaaaaggagagaggcttatgtaacaatagtcatacatacgattgtgtaaaaaaatatgatggaagaagacggatatatgtggaaatcttgaaataag

SEQ ID NO: 507 - DNA, 654 bp, Arabidopsis thaliana
ccgaaatctaaacatgccattatgccaacgagaaagaaaccaacaaaataaaaaaagataagtcacaaattcagtctgttaaaaccttaagaaactactaggctcaaatcaaacccaagacattaaaggtcgaatcattcttttgtagatagtaaaagcctaaaaggtcatcacatcaccacttttattcttcatttttttcttatcatcatcacttagccatcataatcttgacaaactcctcgtagtttatctgaccatctccatcaacatctgcttcacgaatcatctcctcgacctcttcatcagtcagtttctcacctagattcgtcatcacatggcgaagctctgcagcggatatgaaaccgttctggtctttgtcgaacaccctgaaagcttctttcagctcttcctccgagtctgtgtccttcatctttttagccattaggtttaagaactcagggaagtcaatggttccgtttccatcagcgtcaacctcgttgatcatgtcttgtagctcagcttctgttgggttctgccctagtgaccgcatcactgttcccagctcctttgtggtgatgcaaccatctccatctttgtcgaagaggctaaaagcttccttaaactcagagatctgttcatcagttagctgat

SEQ ID NO: 508 - DNA, 653 bp, Arabidopsis thaliana
cgagatatttcagcaatagagagaaagtaatgatcgagctgaaagtcatggcaccgcctcctatgaacacaatggaacagcttttagcggtccaaaacgccatttcacagctcgaacagttaatccaagacgcaaacattgttctcctcaagttccgagctttattactttcgcttttcccacaggcgagtgagaagtttgcggttgcgattgtgatcgctgcaacgatgatggcattggtgccttggaacaatctgattctggtggtgtttcttgaactgttcacaagatactcaccaccacgaagagcaagcacggaacggttgatgcggcggcttaaagagtggtggtttagcattccggctgctccggtccttcttgaacagagcaaagacgataacaagaaaaccaagtaaaaacatctgaaaaaaactacgtcggttttcgtcccacgagagtacgaaaaaaaacagagaacagagcaatgtgtaattagttacgtttgtttgtatatttacatgtatcatgtatgttgtagaaaagtgtttggttttacaccaaaaaaattatagaaaatagtttatgttcgtggtaaaatcacatttagctgaatgatatagaagcaaatcctcttataaaaaaaaaaaaaaaaa

SEQ ID NO: 509 - DNA, 653 bp, Arabidopsis thaliana
ccacgcgtccggtctctctgaaaccataccggatattttcaaatccatgcagaagctccaatctctaaccctctcccgcaacaaattctctggaaatcttcctccgtccattgcatcactcaaaccaattctcaattacctcgatctaagccagaataatctctctgggacaatcccgacctttttatcaaacttcaaggtactagactcattggatctttctagaaataggttctctggggttgttccgaagagtttagccaatatgcctaaacttttccatctcaatctctcccacaattttctaactggtccactccctgccatgaagaacgttgatggccttgccactctagatctttcatacaaccaatttcacctcaaaacgataccgaaatgggtgacctcgtcgccgtccatgtactcgttgaagctggtaaaatgcgggatcaatatgagcttagacaattggaagccagtgagacccaatatttacttttacatcgatctgtcagaaaacgagatctcagggagtctaacatggttcttcaacctagcgcataacctatatgagtttcaagcgtcagggaacaaacttcgattcgacatggggaagctgaatttaagtgagagactagaaagcctcgatctat

SEQ ID NO: 510 - DNA, 653 bp, Arabidopsis thaliana
ccacgcgtccggcggcgcattcagagattcaaactcagagaaaatggtggcgacaggcttattcgtggggctaaacaaaggacacgttgttaccaaacgcgagcaacctcctcgccctaacaacagaaaagggaaaacaagcaaaaggactatttttatcaggaatctcatcaaggaagttgcgggtcaagctccctatgagaagaggatcactgagcttttgaaggttggtaaagacaagagagctcttaaagttgccaagcgaaagttgggaactcacaagagagctaaacgaaagagagaggggatgtctagtgttctccgcaagatgaggtctggtggtgctggtgcatccgagaagaagaagtgatgcgctgactctggttcagcgctctgtttcttctaaaccagttttctgttttttgaattttttgcagtaccttgtgtttcctttggatattttgtagcagagataattaaatgttaaaacgaaaccattatgacttttgagccagttgtcttcgggtgtggctatgtccggtccaatctggtttgaaacgagtttttcttgaccccattttgtagtctttcataaattggtcctacttcgagatttcaaatattcgttacaatgatgaaaaaaaaaaaaaaag

SEQ ID NO: 511 - DNA, 653 bp, Arabidopsis thaliana
ccacgcgtccgtgtccattttcgtggcgaagaagattttttaaggtcttttcaagaaattatggaatctgcagggatccagcaactgcttgctgctgaacgtgaagctcagcaaattgtcaatgccgctaggaccgcaaaaatgactagactgaagcaagccaaggaagaagctgaaacagaggttgctgagcacaaaaccagtacagagcaggggttccagaggaaactcgaagcgacaagtggagattcaggtgcaaacgtgaagaggcttgagcaagagactgatgccaaaatcgagcaattgaagaacgaagctacgagaatttccaaagatgttgtggatatgcttctgaaaaatgtgaccacagtgaacaactgagtataatatctcaaggaaaccatcaactgtaaaatggtgtgatattttcagtggatacgttcattcctttctttatattgttttgtggaatccagactcgtctgttgctattgattttgaaattgtgtcttgaagcattgtattcatttctacagaaagtcgcttaggacttttgtgtgttgtaataaaattgagaacaaaggagcccattggattttgtttcatcaagaagattgaaaatattcgaacaagaaccgtcggttgttttgcaa

SEQ ID NO: 512 - DNA, 653 bp, Arabidopsis thaliana
tttaattcattactttgttttttctataaatggggggattcatgaatggtccagaatgagaattttcaaagggtttttgatcaacaattatgtatagcaggagagtgtattttatacaaaataaatgagagtggttccatggtatagaacaagatggtgtatcccgtcgagcaaatcagctctacatgtcggccacggaggatccaaatccaatatcaaatgagaacttgatgcaagttaactccttcttgcgtccatcaagcatcttcatttttagtgagtatgaaccaggaggggtatatccgggaagaacttgcgagtgcgctaccaagaaatctccaatggccacaggacaacttgtctcatcacaaagatcatgtgtctcagaatgaatatgccatccaaagtaggaaacttcgatcaccaacttgccgctcgagatctcagtgtctgtgttagcagaaattctgaaagtagctggctcgcctctagctataggataaggagttatatcaactccttgtacttttacttcatactcttcgttattatcgcagtagtgaacatcggtggctgcaacaatcgttgaaaccaagagaaaataagagatagcgagagatgagaatcccgtgaacttagacatgattgatgat

SEQ ID NO: 513 - DNA, 653 bp, Arabidopsis thaliana
gcggccgcgctcgaattgggtcggagtcttaggattgcctcactacaacatgaacgacatgccagctgtctccttccgtgtggcgcaacatcttgctcagatcaaacacaccggtaaattcaggatgtatgattatggaagcagatcagctaacatggaggtttatggctctcctgaaccgcttgatctaggggagtcttacaagttcatcgatgtgcctgtggatttagtagcgggaaggaacgacaaggtgatccgttcctctatggtgaagaaacactacaatgtgatgagagatgccgaggtcgatgtatcgtttaatgagtttgagtatgctcaccttgatttcacattctctcaccgtgaagagcttttgagatatgtgatgtcgcggcttctgcttgtgaaacagacaccagttcaacagaggcagaccagtcagaaaggtatgaagttgaagaagaagaaaaaggagggtacagtagtgtagtagctgaaaccgatctatggccaatgttcaatgcctcgtagagtttggtgtctttgtattgtgatgttgtgtgtaagcttcatgtgtgtgttctatgccagtatcctatggcttggctataatagtgtacatataccgtaaagattgatcccttgatgaaatg

SEQ ID NO: 514 - DNA, 652 bp, Arabidopsis thaliana
ttcttttgttttagatttaggctcctacagatctgcttaaatctctgtgatcttgtctcttaattcttctgtttacccgtaatttccggaggattctcttcttgcttttccctgagcttctggatttggtcagagaagccttaagttcaaaaggatttggcttttgaagattggtgttaattaagcttctgggttttcatcagtttgtctaaaagtgagtggagtctctcatcttagtctgaagctcttttttttggatttgagcatttctggtttgagaagaatcttgtggaaaccaaagagaaatgtcgtttcgaggcattgttcaagatttgagagatgggtttgggagcttgtcaaggaggagtttcgattttaggctctcgagtcttcataaagggaaagctcagggttcttcgttccgtgagtattcgtcatcccgtgatctcttgtcgcctgtgatagttcagacaagtagatgggctaatcttcctccagagttactctttgatgtgatcaaaagattagaggaaagtgagagtaattggcctgcaagaaaacatgttgtggcttgtgcttcggtttgtcggtcttggagagctatgtgccaagagattgttttggggcctgaaatctgtgggaaactcacttt

SEQ ID NO: 515 - DNA, 652 bp, Arabidopsis thaliana
cggccgcttggcaaagagatagcattcaagtatagaacataaaagtaaatttccaaaaaaagatagaaaagaaaaacagtgtagcagctctggactgatctgatgctatgaaatattcaaatattgtacacagatgagagaagagcctattaacaaagtcttcgtcatgcaaaatgagagacccaaggaccgagagtgaggaggaatctaccctctggaagcaaattttgcatttatggtcttgtacatttcgtcgatcacactctggtagtatttcagcaactgaggccttttctttttgaaggtcggcgtaagaagatctcgttccatgtcaaatggcactgggtcaagatgaatcgccttgatgatctcgaaccctttcatctttttctctttggccattttaacaagttctccgagaatgaattcctttgccttttcattttgacagagagcgtcatagtcaccactcacaccgttttctgcagcccagcgttcaaggatatgctggtttgggttggcgatagctattaggaaggactcaaagctgttaccgtacacccacacggaatcaacagcttgtacttcaccgtatatgttttctatgttctccaccgcaacatactctccttgtgagagtttaaagatattc

SEQ ID NO: 516 - DNA, 652 bp, Arabidopsis thaliana
taattctagggtttccattaacaatggcagattcttcttcttctgcttcttacattcacatggtgcagcacatgatagagaaatgtttgatcttccatatgagcaaagaagagtgtgtggaagctctctctaagcatgcaaacatcactcctgtcatcacctctactgtgtggaaggagctggagaaagagaacaaggaattcttcaaggcgtatgaggagaggcaaagcaaacaagagcaaatgtcggaggaagagacaaaccagatgatccagaagattatctcggattcatctaaagaatccgacgactgatcgcgatgttcgatcgttagatttcgaaaaccttatagtttatatatatgaatctcatgaaaacgatttatccctgacgcatgcatgtttataagtaaatcgttttttcatcttagcatcggtccaacaagcaagacagcaaaaaaaggagtgatgacactctttttggtacgttatacgtacgtggtccacataatattgcctctgtttaattatatataatgaaacggacgctagctcatacatggatcgatggtgtggtgttttaattgaatgtatcgtgtgtatatattttcaaataaactatttatttaaaaaaaaaaaaaaaaaaaaaaaag

SEQ ID NO: 517 - DNA, 652 bp, Arabidopsis thaliana
ttttttttttttttaaccaaaacgatttaggttaggtgctaaaaccaaatatttcaattacaaaacagagtagtactctgttctacttattgtgacttttgtctaaaaacccaaaacgaactgagttttttttttattacacacagaaagagatatgttcaaagccctctagaacctggaatatcaatccattcaagctgaatctcgacctcaccgcattcgacattcctcaacagaagaatcatgttctgaacgattttgccattattggagacgatactgctcgcttcagccaaacagttttctctgttgggcacaactctcttgatctctgttccatctggaagttcttgcaaacccattttgtgaacctccagaaatggtttaatatctatctttgcatctcccatcttgtcgtgcgatgtgaatgtatctttatcatacactatcagattcacaggttcatcgggatgtcttaacgcaagggttaattcctcgttccactcagggttgcagttattttccacaacacgagtcttcagcttctgtgatcccatggttatgacaacaaaagggtcgctgcttagagtgtctcgctgagcaagattgatccctctcttcactcggattctcagaagccctacaagttcct

SEQ ID NO: 518 - DNA, 651 bp, Arabidopsis thaliana
atagcccgagattaatatgcaatttcaccaagattagagtttgtcaaaaggggtgaaattagaatccgaaagtcattagcctactcgatccggtttactgattaccggattccacaaaagacaaaataaaagcataaacctaggataatagataatttttttttgttcagaaaccgacgaagaattagatccgacgacagattctaaacctctttgttctcgtcggtgatcacggtcttcttctccgcgaagatccaagtgacaccaaaaggatccgtaacttttcctttgaatcccagttcaacttctgcctccgtaacctccactttcacagctccggcgtcaacagctttcgcaacggcggcttcagcatccttagttccgagaagaaaagtcactcccgaaccttccgatttcgcagtagaaaaaccagggagagaggaaacgtcgcaaacaacgaaggaagagccagcgagattaagctcagaagagagaacatgaggaagctcttggtcaagcttacgcttagggtaaagagaatgaccagactcgatcgcaccaaaagcagatttgtagaaagtaacagcgtcaccgaccttttgagcttcaacgagcaacatctgcttgaactcagtgaagacaagatgcgtc

SEQ ID NO: 519 - DNA, 651 bp, Arabidopsis thaliana
  misc_feature (1)...(651): n = A,T,C or G
tcgattcctcgagtgaggaaacatttctctcttttgtaacttacgagaccgagaagagagtaagatatgtccggcgcatcgtctgaggatagcagtattttcgctcgctgtgaagacgtagactgtaacaagaaaatacctgtagagcttgtaaggatgcacatttgttatgctatgttccataggactctggcagctcgaggttttgggacacaaactcaggctaagaagaaacctacaaacaagaagaagtcaacaacatctcttaccgattttgctgtcttcatgaatcatttccgtaaatcttttagaacagattataatggtgcattggtgaaagaaggttcaaagatcggttgggaaatgtggaagtctatgactgaggatgagaagaaagattatctcgataaagctgctgatgaggaagatgaggatgaggataccgtggaggaacaagctgatgattctgatgatgctgaggacaatgaagttaaggaaacagatgatgacaattgaccacaacaaagtagctcaagnnaaaaagtaaannnnntgggtgacgactactaaatatgtnanttatgcntgttcagttgntcttggggggtctttaatcttattgaaatggatttaaggtagtatataaaaaca

SEQ ID NO: 520 - DNA, 651 bp, Arabidopsis thaliana
tccgcatgtcttcaatcgtcgagcacgtcgttctattcaagctcaacgacgacgacgttgactccggcaagatcaactccatggtcaacggaatcaacgaactagtcaatctcgaccaagtgcttcacctctactgcggttcaatccaccgccttatcacgaccaccgcctccgacttcactcacgtccttcatagccgttacagatccaaagaagatctcaacgcttacgctatacatcccgatcacgttcgtgttgtcaaggaatcagaatcgattcgcgaagatatcatggccgttgattggatcgccgaacaagctccggaagccctagcaccgcctcttggttcaattggtaaaatcacgcttcttaaattgaaagagaatgtcatggaagaagcgaaattggagattatggaagtgatgaaggagaaatttgaaggaattgatcagattactgttggagaaaacttttctccggggagatctaaagatttctctattggatcgatttcgtattttagggatttgggtgaaattgaggctgtggatgatcagatgaagttgcagaatgataagattcgtgattatgttgatgataccattgttgttgagttcaatgtgccgtcttcttcataagtcttctaagtgt

SEQ ID NO: 521 - DNA, 651 bp, Arabidopsis thaliana
  misc_feature (1)...(651): n = A,T,C or G
acttttaagtgctatgaaggctgagggcatcccagttagcccgtacagtgtgagaagggcccttgaaaatacatctacaccagtaggtgatctacctgaagataaactaactactggacaagggcttatgcaagttgataaggcatatgaatacttaaaacagtttcaggactatccatgcgtattttatcagataaaggtcaatctctccggtaaaacaattccaacatcacgaggcatctacctgcgggagggtactgcttgcagacagtctactgagtggacaatacaagttgatccgaaattccatgaaggtgcaagtaatttaaaggaacttgtccctttcgaggaatgtcttgagttgcactccacagatgaaggagttgtacgggttcctgactatctccttctcactaataatggacgtggcttcaacgttgttgtggatcccacaaatcttggggatggtgtgcattactttgaagtttatgggattgattgcaaagcaccagagcgtggtccccttttcagaatcccagtaacaataataattcccaagactntggcaaatcaacctccagttatttcatttcagcaaatgtctttcatctcaggccacattgaacgaagatatatcgaggtacctgcccg

SEQ ID NO: 522 - DNA, 651 bp, Arabidopsis thaliana
cagccgctgataactccggcgcttccggcggaggatatctcggaatcctcaacaaaaccaacgatggaaagtcagaaaacaacctcatatttatcgaattcgacacgtttaagaacaatgagtctaatgacattagtggtaaccatgtcggaatcaacatcaactcgatgacttctcttgtcgctgagaaagctggttattgggttcagacattagtcggaaaaagaaaagtttggtcgtttaaagatgtgaatcttagcagtggagagaggttcaaggcttggatcgagttcagaagcaaagactctaggaataccattaccatcgcccctgaaaacgttaagaaaccgaagaggcctttgatccaaggttcgagagtactcaatgatgttcttcttcaaaacatgtacgctggttttgctggttccatgggacgtgccggtgagcgtcacgatgtttggagctggtcgtttgaaaactaagtaaaccggttcggttcggttcagtttggctaggtatcgtttgctttgtttttgtaattgttgtagagtgaataattaaggtatgaataaaataagccgacctgtggcttactctgcattgtattttcatatttgtgtaatcagtctgaataattcagaggttttcaat

SEQ ID NO: 523 - DNA, 651 bp, Arabidopsis thaliana
  misc_feature (1)...(651): n = A,T,C or G
tacgctcttcttcacctagctaccaatatatgaacgagcaggatcaagaatcgagaaattgatttgagctggcgaataagcagtggtgggatagggaattagtagatgcggcggcgatggaaggcggttacgagcaaggcggtggagcttctagatacttccataacctctttagaccggagattcaccaccaacagcttcaaccgcagggcgggatcaatcttatcgaccagcatcatcatcagcaccagcaacatcaacaacaacaacaaccgtcggatgattcaagagaatctgaccattcaaacaaagatcatcatcaacagggtcgacccgattcagacccgaatacatcaagctcagcaccgggaaaacgtccacgtggacgnncaccaggatctaagaacaaagccaagccaccgatcatagtaactcgtgatagccccaacgcgcttagatctcacgttcttgaagtatctcctggagctgacatagttgagagtgtttccacgtacgctaggnnnagaggtagaggcgtctccgttttannaggaaacggcaccgtatctaacgtcactctccgtcagccagtcactcctggaaatggcggtggtgtgtccggaggaggaggagttgtgactttacatggaa

SEQ ID NO: 524 - DNA, 651 bp, Arabidopsis thaliana
  misc_feature (1)...(651): n = A,T,C or G
agcggcactaattgaaaatcactccttgtttttttgaagaaaaagtaagatgtagggctgagaattcgtctatgtgatccaacggttttaaaatgatccttgttccttcctctcctatttatctgaaggacgaagtccccacgctgcacataaccggggcacttaacgtatagatcataaacaaagaagaagaaaaaaaataagaaaagaagaagaagatgtcgtggcaaacttacgttgatgagcatttgatgtgtgatgttggcgatggtcaaggacaccaccttactgctgccgctatcgttggtcatgacggtagcgtttgggctcagagcgccaacttccctcagttcaagggacaggagttcagtgatattatgaaagatttcgacgaaccgggtcacttggcacccacgggattattcatggcaggagcaaagtacatggtgatccaaggtgagcccggggctgtaatccgtgncaagaagggagcaggaggcataacgataaagaaaacnnnnnnnnnatgtgtgtttgggatctatgaagagccagtgacaccaggacagtgcaacatggtcgtcgagaggttgggtgattacctcctcgaacagggtctctagaatcttcttacaatgttccaccacctac

SEQ ID NO: 525 - DNA, 651 bp, Arabidopsis thaliana
  misc_feature (1)...(651): n = A,T,C or G
ttattgctaagttagctactgatcagtttggattacaacgtttttggttgtttgtgtaggtgtctctagttgatgctaagggaacaagatttagcaaggaagggaaaattgtgggtcttgatccagataatgatctagctgtgttgaagattgaaactgagggacgtgaactaaatcctgttgttctcggtacctccaatgatctacgcgtaggtcaaagttgctttgcgattgggaatccatatggatatgaaaacaccttgacaataggggtagtaagtgggttgggaagagagataccttcacctaatgggaagagtatttcagaagctatacaaaccgatgctgatattaactcaggcaattctggagggccattgcttgattcttatggccataccataggtgtgaacactgccacattcacccgaaaagggagtggtatgtcttctggtgttaactttgccattcccattgacacagttgtccgaacagttccgtacctcattgtgtatggaannncttatagagacagattctgaagtaaaccaaacatcttctttgcattttgtctatcactttgtctattgtttgttgataatacaattcgaaaagtttcagacttgtctctctaaatgtaaatacaaaaag

SEQ ID NO: 526 - DNA, 650 bp, Arabidopsis thaliana
tttttttttttttttttaaacaaactcaatatctattttgattttggaaagcttttggagctcaattatccattgaaacaaacaacacaatggaagtaacaccaaaacacagaacaatctgtgaaattcattcatggtttatactttactactcaaagcaaagacgtttaccagaagcaaattgattccactctttcatcagaaaccctaaaatcactccaaatcctgaacgatcttgatacccatagaattagcagtaccaatgatggatttgcaaatcgattccaacggcatatactgacaaaacggatccgtctgcttcaccttcgcgatctcgtacacgtgtctcaccgatagcgtcgtcaccgacaaatgacccgggcgtgtgcttcctttatcgactccagctgctttcttgatgtaccacgacaccgtcggagacttgacggtgaattcgaaagagttgtccttgaacgccgttatcgtcacggccatcggagtgtctggtttgtacttttgagtcctagcgttgaagtctttgcagaaagccatcaggttaagcctgtactgacctagcgccggacctaccggtggggctggcctcgctcctcccgccggaacggttagccttattgttgccgccactggtc

SEQ ID NO: 527 - DNA, 650 bp, Arabidopsis thaliana
aacaccaaaaactatatattatataattcaaaaaaagaagaatgattctgactcgagaatcattcataaaaacaaaagtctcaagaaagcaaaaagggttagagcctgaggcaaataaagtggtggtgtcttctcgaggatcaaaaaaaacatatttaagtgttttcaccaacgagaaatatttattccactcactacaatagaagaaaacatttcgccgttaagaaaagaccggaatcaatggtggtggtcttcatcgtcaccatgaccgtctggtggtccgtgctcaaagtattgggagcacactggacattcaaatgactttcctttatctagccagaaccaaacgacgtcgtgtccatcctcgccttcaccaccacggcatccgatatttctcttgtcaaagtaggactgtacgacagcaggagattcctttgtaccaaaaggactttcagggtggtcgatgtcaagcagcctccttccctatacaaggagaacacaaaaaaaaagtcaaaactaagtttctgatctccgaaagcaacatcgaagtacactatactctttgtcaagacgaatcatctacagtagatatcaaacaatatcaatatcaatttctcttctcatctcatactctccgtcgacgcggccgc

SEQ ID NO: 528 - DNA, 650 bp, Arabidopsis thaliana
  misc_feature (1)...(650): n = A,T,C or G
acttataggaagtctaagtgccagtctgaagacatattcacaccacacacttgtctaatactaataataaggcagtgcataatactttacatgagacattaatttttctaacagcttaacgcaacgaaaagataccgttttaaagattctcctcctaacgaaaaactactcactgttctgagaaataacttgtccaaaccgaagaaacagttgagcatcagaagcactcatggaagagcaattgacagaatgaggagtcttgagatttgcatactcatcgacgtagcacgaaccagccagcgtcgctgacgtgtcagtcgcagcaggtggttgttccgatagcataaaactgccgagaacacgagtcacctggtgcattgtgggtcgatcattcggctgtcttttggtgcataggagtgccagttggaaaactttcttcaccacaccgagatctttacacgtcgatgtgatgtctggatctgccatttccatcacttcattgttccccgtcnttgacattatcagatggtggagattnnnntcgtcatcaacggctttccttcgggttaacaactcaannngnactattccataactgtagacatcggatttctcagtgagccgtgaagtgcgagcatactcggggtcta

SEQ ID NO: 529 - DNA, 650 bp, Arabidopsis thaliana
ctacgattattcagagagaggaaacatgatctttgtttctccatccagtttgtttactgattttgtctctggtatggtccagctttgtctccggcgaggttcggctttgtttcggctatctgttgccgctttttgttttttctgttgaataaattatgcgatctatattagtgttgtggttttaggcgattcgtttttgcctaaacacaattctctccaacataagattgatgaatatgatgcttgagttcttgaaccgttgacgtttaatcgggaagattttgaagttgaattttcatgaagttgaagatttgtttttagagctttggaattgacaattgctatcaccggattcaacatgcatatcgcggtgttctgggtttctatggagtcaacaatcttcttcggcggcgaccagtgattctccgatcttcttcttctcacgtgtcttcagcacctaaccttctcatgacacgtgttttaggttctgtttcaatgattcttctttcttcctgatgcggtttcctacttgggcttcatagttgggtttgaaaagtcttacacttatgtttagttgaatttggctctgttgtttgtctcaaactttggcttatgttgatataataaagggaaatttgcatttaaaaaaa

SEQ ID NO: 530 - DNA, 650 bp, Arabidopsis thaliana
cttttttttttttttttaaaaggatatacatgacgaaatggtaaataaagttgaatagtaaaatattcaaacaacaaacaatacagtgagaagaataataatatgataaaaaaaaacagttttttttttggtttttaaaattggaaaaaaataaaaggacagtttggccaactaaccaagcatgtgtgtttgtcccccttcgtgacctggcgttggcggcggaggagaagaactaacggcggagagaatcgcagtcatagtacgaatctgcatctccatcgcagctatataatcagtggtttcttctaaaaccaccggtaatgattgtttacggcaaccgggaactaaccggctcagtactttcactttcctctgtacagctggcaaacctttagccttaagcctcaaaaccgtcgctctctgtttctttgacctgatactcccggtggttaacgtcgtcgtcgtcggattagagattctctggcgtttgtgtttcctgaatttgagttttacagcttttgaaagtatcgctcgactccataacgttttacctctcgccgcaactgctaaagctctatcggcgacttcacgtacggctctacctccacgtggaatcgaagaagatgatgatgaagatggttgttggctga

SEQ ID NO: 531 - DNA, 650 bp, Arabidopsis thaliana
ttttttaagctacaacatcaatttatatttttattaagcaaattagaaatacacagttacaaagaagagacgaaggaacaacaaaacaaaggaacaacaaagtaaaggagtatatacaaacttgtcgattgtacacacaaccccattttccattattttgcatcagaacgtcgtacgttcattattaacaatccaagaaagaaagaaaaaacaaacatcttagaacaacaacaagtaggtaagaaaacatgttcaagcatcggtatgattcgtttgtttcataggtatgtcataggtattcaacttacgcgcactggaaactctttggagcattcctactacaaacattgaggagtacgctgagattgataggaaggttaatattgacaattccaagaatgctagctttgagcgcagtgcagaggcaggccgcagcctcaaggtcagccaagccttggatgagcgagcaacatggctttacaggtgggtttcccaatgttaggtccactagattgagcacagtgacacaagtaccgatctctatggaatttttaggacaagtccctgtggttgcagaggtgtaagtgaagaagaggaggttgagagaaacgaagagtgcaaggggggttcttggagccatttgtttgtgt

SEQ ID NO: 532 - DNA, 650 bp, Arabidopsis thaliana
tttttttttttaagcaagcatttcttgagttttgaaacaaaacactgttttacgtgttcacagcaacatcaagaacaacaacaacaacaacatgaccgttttacaatacagccaaaaggcaaaagcttagtctgaaaatacaaaatacaataaatctcacacaaaggaccaattgatgaacacaaagcagatgcaatgagcattttcttcttcatttagtactttccaagcaactgctctctcatacgaaactggtctccccatgcttgagagacatatcccgccttgaaggcacgcgaagccctgttgcatgatctgtgggaactcagagcaaagagtctttcttccattgtcatcaaatatcttctctaaagagatgtcttgaagagcaactaatgtagtctccagcatgtcaagtcccgcctggtttgcaaatgtgaagacgggcaaggccttcattgagcagcagattatagcatcagtgtgatgccaaagattcttaagactagattcattgccgtcactgtttgatttaagtagctcaacacccatgtagcccctgtaactctggcaaatccaacgagcaagtgtttgggcttcaggagtacccaaaggagtgcgtagaccaacttgtgagctgatatgagaag

SEQ ID NO: 533 - DNA, 649 bp, Arabidopsis thaliana
tttttttttttgttctcaaagccaaagaaaccaagcgacgagcttataatagagatggtgtctcaatattcagacttcagaaatcaacacccggcatatattatggccgttacgcattcattattcaaaacgagacaagtttttttaacaatttggccaaaacaacaaaggctgtgtttttttaaggttacagtagcaacttccataaaagtagcagagcagagatgtatctgtcagttcttccttccctctgataaaataatgtggtatccgtgcgttgatttgaagggtgcactggtgactccaacaggtgtattaaaggcgacatcttggaatggacctgccatctttcctcgagggaaccatccaagatctcctccttttttccctgatggacactcagagtactctgctgcaatctttgcaaactcagcaggaggaaccttgtctccgttgctcaaccaaccatcctgcaactttttgtaggcctcgttgatctttccttgcttctcgcacaaaacatgtcttgctttaacataagtgcatgtcccaagaccatctgcagcttttcctgcttttcctttacccttggagggagcttcttcactaccacttgcttgctttcctttacccttcccaccagcttttg

SEQ ID NO: 534 - DNA, 649 bp, Arabidopsis thaliana
  misc_feature (1)...(649): n = A,T,C or G
acataatctccttgatcttcttgtctgtgttactttatcaatccactaccgtcttatctttccgacaaccattcaacctagcgaaaccatgcaagcgtttcgtcttctacctccataatgttgcctacgacggtgataacacggataatgctacatcagcagcaattgttaaccctttaggtctaggagacttcagttttgggaagtttgtgatcatggacaaccctgtgacaatggaccagaacatgctctcggaacaggtggctcgtgttcaaggcttcttcttctatcacggtaagacgaaatacgacacttggctctcttggtcagtagtattcaattcaacacaacacaagggggcattgaacataatgggtgaaaacgcgtttatggagccgacaagagacctaccggtcgttggtgggactggtgatttcgtcatgactcgtgggatcgctacgttcatgactgatctcgttgaaggcagtaagtatttccgtgtcaaaatggatattaaactctatgaatgttactattagagttactaatacatgtcttgnnnntgatgtttctatcttgatatttttgggtttgatgtttctttgttggcactttgttgcttttctctgttcgtagttgatgttgtacc

SEQ ID NO: 535 - DNA, 649 bp, Arabidopsis thaliana
tggtttttggataatcattcgaatacatttttaaagatagataaatcgactggcgtctctaacacaaagtacgctgatcgaacgaacaatagcaaacgatcctaaaaagagcttctctagcatcttatcaaacaacaactcttaaaaacatttagaaaacagaaaagcaacacagaacaaagcgggtaactaaaaaagtcctattccttggcggatttgttgatgagactcttgtggatatgagggatgactccaccaccagctatagttcctttgatgagagtatcgagctcctcatctccacgaatcgcaagctgcaaatgcctcggcgagatacgtttcaccttcaagtccttgctggcgttaccagccaactccaaaacttctgcagtcagatactccaatattgctgctgtgtaaacagctgcagttgctccaacccttccatgagcagtggaccttgtctttaacagacgatgcaccctaccaactgggaactggagaccagctcgagaagaacgagtgataggcttcttcttgtccttatccttgtcgctaccgctgggtttccccataatcaaacctttagcacctttccccgacattttcccgccaaatatctcacagtaaaatccttggagattgaaag

SEQ ID NO: 536 - DNA, 649 bp, Arabidopsis thaliana
ttttttttttttttttttttttttttttttagtcatagaacgaaaatttccaagataaatctatccattgtcttacaaaacgattcgagctaaagaaaaaagagaacaaaatctcgttcaagaacacaagggacatgaaaataaagaaagaaagcttaagctgctgatttcttggacttggcagccaactgagtctccggctcttttttgacaggctcttccttctctgacaaaatcaactcaatgtggcatgggttggacatgtaagggttgattcttccgtgagcacggtaagtccttctcctttgctttgcggcctggttcacttggatgtgtgatatgaagagggcatcaacatccaaacctttcacctcagcattgctctcagcgttcttgagcaaatcaagaacaaactgagcagacttggctggccaacgtccttgaccattagagtccctgttcttagcttgagcagttctcccaacacctctgcagaaacgtgtgaagggaattgcttgcttgtgagctatcacatcctcaaggtacctcttcgccttgatcaatggtagcttcctgattgcgtgcgctgtttccctagtattcttgaagtgaaccctaagatcggatcctctagccttgcaagacttgg

SEQ ID NO: 537 - DNA, 649 bp, Arabidopsis thaliana
  misc_feature (1)...(649): n = A,T,C or G
ccacgcgtccgaattcattcatctttaatcttttttgcttcaagaacacgatgagcgacaataaaaatcttctcctgagacgaatggaagaagaagaagaaaaagatcgagcaagaaaacaaatctctgttttatcctcaaaaagatcccaaaccacaaacgcaaacgcagctgttacagctccgtccgaggtggcgtttaacgtttgttgtttatgtgtttattgtcctctttgtgttctttggtgctgcatcaaacagccttgtacaattggatggagagccattctaaacgccaaacgcagattaagcggttgcagcggctgcggtagaagctttagcaggagggttttggctgctgattattcgtctttttccgatattgattctgatgatgtgaattgcaaagctcataattgctcaacacgaaatcggtgactacaaaaatttcattgagtttcatgaatttcccaaacttcctttttctctgatctaaacgccgacgcaaaacgctggagttgacttcataatgctgagttgatgaaaaatctcgagattaagctctattatttcgataatttagnnnnnaaagatgttgttgtgattgattatataaagatgtatatattacttggtgaagaataaagttg

SEQ ID NO: 538 - DNA, 649 bp, Arabidopsis thaliana
ttttttttttttttttttagagaaaatgttgtttttttcctttttcacaaaaaaccaaaggagttgcttaataatgtgtcttgagggttgacattaaacttgaacaaaacaatttccaaaagtgagaacaaaaataaattaagacactataactgaactgtaataaaatttgaagaagagaagagattagtttgttttcttgtcttcttcttctttctcagtgatcaacttcttctctgcagtttcatcctcacctccaaaaccgaactcgttcacacgtgtcttatccactgggtaaacccacctttggtataagtatatcaagaatatcacatcatctctgaatacagaaagtcgatgtaaaatcggcattttgatgacaaaggcaaagagatcgtcgataatggtgttgaggaacttgtaagtcatctgtctccatggtaaatgtgccactgatttaagcttgtagttgatgaatagctgaggacacatcatgatgaaaccgaacatgtagacacagcttgttagtgaagatagtatccaagaataccagctcttgtggcgttcataagcgagagaatatatggacaagccaatgacaaggaggaggagcacataggataagaatttgatggcaatgtcatcatac

SEQ ID NO: 539 - DNA, 649 bp, Arabidopsis thaliana
  misc_feature (1)...(649): n = A,T,C or G
ctttttttttttttttaaacttaaattcgataatattaaagatagagaagtacagagaattgtagtacaaacggttacatggaaaccttaagattcatctaaccagtaattacatctctttactttgacttaacctagacgacacggaaacaaacgaagaaccttaaggaaaaacagaaagatacccaaacgaagaagaaaccccaaataaaacttaaacttgataaactaaaaagatagagaaatacagagaattgaaaaaccgaagaagattacatcaaaacctaagcttcatctttacccgtaaacacatctctataacttgtcttacgaccaactaatccacttaagacacagacgaaatgacaaaagccaacctatgatttacccagagaacctgacgattaagcagaaattaaaaacccgaagatacagagaaagatacgaaaactagtaaaaagtctatacacaaatactcctacacaaacactaaaccctaagaagagaaactaagacctgttaagaagatatttcgatcttgccccttgaaaaaannagggaagattcgaaacggttcataacgaagatgtgtgtttcttcatcttctagattcatcatcgtctggagattatattttgttgcagatctc

SEQ ID NO: 540 - DNA, 649 bp, Arabidopsis thaliana
  misc_feature (1)...(649): n = A,T,C or G
gaagtttttgctctcttcagttgcaagctcccctatttcggtttggaaacgtctgaggagttcaatagcgatatttctgaactcgttttctcgtcctttcatgctcacaatcaccttaaccttgtcaccatcttgcaagaacttttgggcagcccttagacgaacggaataatcatgctgannnatattataacccattttaagctcctttaaatccatgcgagttgttttcttttgctgatcttttttcctcttttgctgttcgtatctgtatttactgtagtccatcattttaacaaccggaggatctgcatcaggcgatagtataaccagatcaagttcagcatcatcagccattcgaacggcttcgtctttagacactaaaccaagcatgttttgttgcccatcgataagcctaacagtagctgacctaattgaggagatatcaagagcttcatcaatttcagcttctttcggcctacctcttctattgtctccagagaatcgataacctccaccaccaccgccgaagcggcaagtgacggcgaaagcacggcgaggagaaggagtgagattagtgaaagacagttcggttttggagagacgaagactacagagtttggaatcaacagagaagagtgaatgtgat

SEQ ID NO: 541 - DNA, 649 bp, Arabidopsis thaliana
cggccgccaaatatccatacaaagaagcaaaccccataaaatattgccccaaaccttttaacccaattattacgttgaagaagagaaatacaataacaaagatacatttattatctgtttctgtctttttttttcttttactcgggtgtccaaagatatatattgaagatagtgtggtttccaagctttcctacgaagatgccgcaccgctttggccgcaccgccgtaatgaacatatgtcttacattcttgacttggcgaccacaaggctagtcccttcacccattccatcagctcccggccttgtccaactctccttgaactgttcttcagtgacaccttttcccatggctgcagtggaggagattccaccttggacggtcttaagataacgatcatagtaattagcaccggaccatttctggtgagccaaagtgtcaaccccatgggtcctctcttctctttgtatcctctccacataagccaacatcccgcgcctagcgtaatcctttgcaaatgtatcaaccacaagagcatccgcatggaaacccgcaagcgttatgaactgccaacaatatccgagcctagcaatccgcggaatgaactcaaccatctgctgatccgtcataccggaagcgtcccagttgaa

SEQ ID NO: 542 - DNA, 649 bp, Arabidopsis thaliana
  misc_feature (1)...(649): n = A,T,C or G
ttattggcttaaaagcatttgcaagatctcaatgtttcaaataaggcataaagctcatgtacacacccaacacacagcttcaagatataatnnnnnaaaaaaaaaactaataagcaaaagtagccaaagtaaaagccaaactgagtttttttctttctttcttatttctcctgtttaatacgcaatgtactggtggtgggtattattgcttgttatcatcccattgcatacttctgagtccaggattgagctgtggactcgtacttgactcggtctgtcttgtagatgtgcgctatttcaggaaccaaaggatcgtcagggtttggatccgtcagcaatgagcatatcgacagaagaaccttggatacggtaagtgcagggctccactgctctttcagaatgtcaagacagatacttccattactgttgatgtttgggtgataaaccttggtccggaaggcaacctttggtggcttgaaagggtaatctggtgggaagtgaatggtnacaagaaacacacctccggcaaacgggctatctgctggacccatgatagttgcttgccattggaacatatcatctcccgtaggacctgcactgcaggacacaggaggatctctttgcaagtccctaagctctttgttaattc

SEQ ID NO: 543 - DNA, 648 bp, Arabidopsis thaliana
tggagatggccagacaacgcaggacgtggctgaagctgcttcagctggagataatgaggctgtcgagtctgatccctttggactagatgcctggattcccagttctggaaagaaaaatggtaaaacaaagataaagagaacaaatgaagatccagatgccgaagagaataagaggtttctcaggtcaaaaagagaagctttgattacatgcttggagattgctgcacgccgttacaaagttccatggtgccaaacagttatagacatattggtgaaacatgcctttgagaacgtgtcaaggttcacatcacagcagagacaagcagtggagaaactctgggcttctgttcgagaacaacatctccgtaggaagcaaggcaaatcagtcacaggaaaactcgacgttacagcttttgaatcgcttcaggataaatacgccaacgagaaaatgagcatccgaagctcagttggagccagcggtgaacgccgtgcacagcaatggctcggttaataaaacagtttccaaaaaggtctgattggtaggatttgttcactaagacatgaactagaaaagcaaatagagaaaaatattgctctgtttctgattgtatcttagaacaaaaagttaccacctttatccaaaaaaaa

SEQ ID NO: 544 - DNA, 648 bp, Arabidopsis thaliana
gatgccgtttgaatccggtcttggccatgatgagacacaatcacatggcttaatgttgtgcacagagtatctagggtttgagagttacgacatgaggatgtccgataacgaggtggagaacaagatgacttgtcatgcggaggtggagaccgaaagggttgaagcaaagaggaggaagacgaaggagaatgtggtggtgcaagcgcagaaaaaacagtttcctccgcctctctcgtcattaaacagccgtggacagcgatatttttatctccgtccggtgagaaaagacggtagattggaacttacgcaagttatggtcgatcgaccagagattttccacgtttctagagtagatggacggttgagattacattttgtcgatggtgtcgagaatcccattagagcttattctggtcctcaagaaattgtggccttagaagaggaatctaagggtctaggtaatgagaaagagggaggggagattagtagatctgatctggaatgtggtagagagattaatgaagacgacaatgatggtgcatgtaatcaaggaatggatttatctataatcaatgatgatagtggtgcaagaagttggagatgtaaaagtagtcatgatgtttcggtgaatagtaataatgatgttgc

SEQ ID NO: 545 - DNA, 648 bp, Arabidopsis thaliana
ctttttttttttttttgctgtaaatatggatttttctgatgcaataaacaccaaaatgtggacaaagtggtctcatatagaaagtcaaatttcattacaagactgtaaaaatctattaaaacattacgaggttacaagccatctaacgtgaagagacatctctagattccattgagagtgaccacaactctgcgtgctgttggagcatcacggtgttcacagagccatattccctgccaagttcccatgctgagttttccttttgttattgggattgtgagttgacatccaaacattgatgacttgatatgagctggcatgtcatcaggaccttccatagtatgcctccaaggcgctgaattcccctcaggaacaatcctgttcaagaaagtctcagtatcagcctgaacatctggatcataattctcattgattgtcagagaagcacttgtgtgttgtaagaagacatgagcaagaccacaattgaaatctgacaagtcttcccttatttctttcaatatctttggagtaataagatgacatccacgacgtagcggtggaagcgtgatggttttctgagcccacttagcaccagaggaactcgccattgaagctctatcggtagccggattagctggagtcaaaacc

SEQ ID NO: 546 - DNA, 648 bp, Arabidopsis thaliana
  misc_feature (1)...(648): n = A,T,C or G
tttaatcaaaacattcctgttatagattaaaaaaaataaggagctcatcgaaacaagcgagccctcaaaatagagtcaatacaagaaagaaaaagaaaaaaaaaactaggggacaaaacaggaaaatgttgaaatacaaacacataaagactgagagtaagagagtaagagagaaagttattagtcgacttcctcaatcttgggacctgcacctccggcagaaggaggaacatcctcgtccattcctcctgcagctggaccaccagcttcaccgccttggtacatctttgctatgatcgggttgcaaatactctcgagctctttcatcttgtcctcaaattcatcacactctgctagctgattcgcttctagccattcaatggctgcttcaattgagtcttcaatcttcttcttgtcatctccagcaagcttctcgccaatcttctcatcacggattgtgttcctcatgttgtatgcgtaattctcaagagcattcttggcgtccaccttcttcttgtgctcctcatcctccgacttgtacttctctgcctcttgaaccattttctcaatctcgtcctttgacaatcttnnnnnnncnttggtgattgtgatcttgttcttctgccccgttgtcttgcggacgcgtgg

SEQ ID NO: 547 - DNA, 648 bp, Arabidopsis thaliana
gaaaaaggaacttcgtgggtttaggtaaaatacaaaccaacccaatgagtttaatttccttttcttttttctttatgtaggatttgcacaacactactgttttatgagagaaagagagccaaacaaccactgctaaaattcaatgaaatcccatagtagctttgaaggcaggagcatccggaggcggtgaaggcaacaccgtcaacgccaatacaccacttaccgctgccgcaatcgctcctaacacaaatgctggaatgtttccaccaccgaatagttcgtcgaatggtccacctcccacagatattaccatctgagggacgacaatggctagattcagaacacctagggaaagtccttggccggcaccggaattggttgaaaatatggaagctagtgcaaaaggaatgctaaacgtaatggcttgggggataccgaggatggcgaagagagttaaagcaccagctgtgacgttaccaggtggacctgttttagcgccgccgtgatctcgtcggtgattctcagcttgtttcgtaaccacaaccgtcatggccaagcaaatggcgaggatgaagttaacaataccccaaagccttttagctcctcccaatttccgaccaatccattcaacaccaagagacatgaaac

SEQ ID NO: 548 - DNA, 648 bp, Arabidopsis thaliana
  misc_feature (1)...(648): n = A,T,C or G
gctctctctccttatctccataaatctcatctcaggagagagcttgatttgttagggccaatgaacttcgctgagaagatggtcttagccgtgtttggtgggttggttgtgttgtggatgacaaggaatataactgatgatatccccggctggggtcggatcttcgccggccgagccggggatggaaccgtgagtgtgatgatggcgacattgttgtttatcatcccaagcaatattaaaaaaggagagaagctaatggactggaacaaatgcaagaaactaccatggaacattgtcttgttattgggagctggattcgctatagccgatggagtacgcaccagtggcttagctgaggtcttatccaaaggacttgtcttccttgaaacggctccttactgggccattgctccaacggtttgcctcatcgctgctaccatcacagagttcacttcaaacaacgcaaccactacattgttggttccgttactcatcgaaatcgcaaagaacatggggatccatcctttgctcntgatggttnnangagccatnnnnnctcagttcgctttcttgcttcccacgggaacaccctctaacgtcgttgggttcacgacagggcatatagagatcaaagacatgatcaagaca

SEQ ID NO: 549 - DNA, 648 bp, Arabidopsis thaliana
ccacgcgtccggagacatccgttgctgcctgatattaagacaggtggtttccgagttactggaaaattagccacccaatgctctttgcaggatccactcagtggtgagttaacagtggaagcatcttcagttcctattacttctattgacattcacctactccgagtcgagtcgataattgtaggggaaaggattgtcactgagacctctttgattcagtctacacagattgcggatggagatgtgtgccgtaacatgactctacccatttacgttttactacctcggcttttaatgtgtccttccgttttcgcaggtcccttctcagtggaattcaaggtatgcatcaccataagtttcaaatcgaagctagccaaagcacaacccaagtctgatccaacagctccaagactatggatggcgctggagagattaccgctggaacttgtccggacaaagcgagatcagttcagctgctaaagaacaagctaacatatatggtcaacacatgtttctcatacgcatacacttggctttgtagtcgtatgcttcctagcttgctctgtctggctaatataagcggtttaaaacgtgtctgcgtgtacaaatcccgattttattaccctgcccaatgtttgttactatgca

SEQ ID NO: 550 - DNA, 648 bp, Arabidopsis thaliana
tttcagaactgacaagatcaaggacgaagacattgtcacacttgttgatcagttccctggtcaatctatcgatttcttcggtgctttgagggcgagagtgtacgatgatgaagtgaggaagttcgttgagagccttggagttgagaagatcggaaagaggctggttaactcaagggaaggacctcccgtgttcgagcaacccgagatgacttatgagaagcttatggaatacggaaacatgcttgtgatggaacaagagaatgtcaagagagtccaacttgccgagacctacctcagccaggctgctttgggagacgcaaacgctgacgccatcggccgcggaactttctacggaaaaggagcccagcaagtaaacctgccagttcctgaagggtgtactgatcctgtggctgaaaactttgatccaacggctagaagtgacgatggaacctgtgtctacaacttttgagctatattatcctgcttattaatttgctgttttactcctattgtctcttttggtttatttttctcctttgtgtaattgtggattggatcttgtcctcttttgttccctttttttttttatgatgtacaacacattggtaatttaaaattgccttgtcataaactacacttcttaaaaaa

SEQ ID NO: 551 - DNA, 648 bp, Arabidopsis thaliana
cttttttttttttttttataggtttataactttataagcaaagaagattcttaacaaatgaaatttataattttaataccagtttctcaagaacagcacttttctcaaccaaacacctttcaaaacgctctggttctcgaacgcgacaaaaagagatgtaaaccgagttataacaagttgcgtttcaaagggtttcagataggaatatgaagaacttttgattgaaactccagagatctcaaaggtgtgaagtttgacgttgatcaaaacatttcttgagactttctgacacaacggctcactttcttcttgaactcatctctcttatctcgccattctttggcagcttcaacatttgctggagactcatcgttaggaccagaaagcattgatatgatactcaacataatactctcaactgtatgaacaggagtccaacgctcgcttgcaagctcataaccgctaggatcatcaccgggaggatgaagaatagatatgcaaacacgaccatcagaataaacgttaggatgccacatatccgaagtaaacctcacggttggcggactattcggatagttttgcggaaatgtcataatcgcgttaaagaatcctccttcatagagagtatcaggaggtccgataatggta

SEQ ID NO: 552 - DNA, 648 bp, Arabidopsis thaliana
taactgaacgtactttatttaatactcattatatcgaaaccgatatatgatgagcataacaacatatcacagcatattccaaaaccaaacagttacagagaatagaaactccacaagaccccctttattatattgattatcgaaaagacaccataataatacaatatcgatcgagatagtgatgacggtgatggttgtggttaagctttgttgacgtggccttcaatgtcaacaaccatttgcttgacgaatttcatgtagccgcttggttcgggaaagtcatcgttgcgcttctcccatatcatagtgattttgcagacgcagctatcctcagatttgggaataaattcgtagatgatatcaaatactttgagatgctccatcacgtgaccatccagtcctcttttcgtcaatgttttattctcatcatctatctctctcttctctttgaacatctccttctttccatcatatgtgtagtcccaactcctgatagacccgtgagagtcatgttcctcgctaaacctcttttggttattgctcttcttcatcttcttcttattcatggtcatgccactactaatctcgctgaaacagcagttgaaaaaatctccttcttccatggttttcaccagatcttgtaagttt

SEQ ID NO: 553 - DNA, 648 bp, Arabidopsis thaliana
caaagggtttaagccaaaacatgaatcaagccaccaataaaggacaagagctacttccccaagagcaagaacatcaaccagtatagtactttcagctatacgtagacagaaacacttgtacgagtggttgaatccttagtctaactgatacacaccctaaattacacacagcttttttatttatcaaaaccctattgcacttccttattcaagattatgccctttctcttgaagttcagtaataacctcattcctcattctcaaccacagtttctgagcctctttatcaaacttcttcttctccatttccttctggtaattatcagcctcaccttcggactcaacaattcctttcggtccaattgcagtaccaatcattcccccctttgcaacaaaatcctccatagcctctgtatcaccaggataaggaaactcacgccgctcatacaaatgagccaattctctctcttcctttggtcttggcttcagcgtccaccaacctaaaggagacgtttcattgtaaatccaagccataccaaagattgtgtaagtgcatagcaatgcttttcccacttgtttccaaaagaacatatcgtcacgccctaatccaaccttcttcaagtagttgttagcatccattgacttcaa

SEQ ID NO: 554 - DNA, 647 bp, Arabidopsis thaliana
  misc_feature (1)...(647): n = A,T,C or G
caaaaggaaattagatgaacatgcttaattgattatgaaactaattactactcacgtatagatttctttattgagtactaatgattanncaaggcaaactacatagagactataagcctataacacatgcccagataacttaatatcactactttacacgaaccggaggaatactctgctcgttcttgaagaaattatcaggatcatacttagctttaacatccatcaatctcttcaaattccccaagaaatacttggatccgtagatcttagcttcatccacgtttgtctcaccacttggattgcttccaatatcgatgtctctgaaattaaagaaggcctctctcgggttacttgacacgtacggttccgccacctcaaaaagctcattcatcatagccaggctactctgtgtggcgtttgcgtcaaaccacatcgtagagtattgaaccttgaacaagtttcctttccgatgaggaaaagcggtggccgttgccnnaatccggtccatcactccaccgtaagggttgaattgcaacgagacgctactgttgaatttaaacattgtcttccaaagcttctctaaaccttttttgggtattggttttttgacaaaatccgatttactcttaaatgacactgaattc

SEQ ID NO: 555 - DNA, 647 bp, Arabidopsis thaliana
tgttgtatacctaaatccatcatacaatatatgtctcttaatgttacaaccacaaactctgaaacatcaaaatcacattttttttcccaggtgatagatagatagataagatcaaattccatcatcacaaaaaccaagtattgaaatcaggatcaagagcacatagctttctccacctcttcctgcaattctccagtcttaaacgcctcaagagtaatatcacaaccaccgaaaaactcaccgccgatataaagctgaggaaacgtcggccaattcgaatactctttaagtccttgcctcaacatctcattctccagaatattcacatcttcgaaaggaacattcagattcttcaaaatctgaaccacagtgttggagaatccacacatcgggaagtctctcgttcctttcataaacagaaccactttctccgaattcaccagtttctccagcgtgtctttaagttgcggcgtaagagccgacgctgagcatcggaatttagttggtttcagcttgagattcgaaccgtagaacgatagctgatggttatggacgacgagtgccgacgttggtttaagagagaatctgatagagtgaggcttgttggtaacggaggaggagacgacggcgaccgaagttatcaaggt

SEQ ID NO: 556 - DNA, 647 bp, Arabidopsis thaliana
  misc_feature (1)...(647): n = A,T,C or G
atcacaggttgattatatccttggaaataatccaatgaaaatgtcttacatggtcggatttgggacaaagtatccaacacaacctcatcatagaggctcatctttaccatcgatccaatctaaaccggagaaaattgactgtaatggaggatattcatactacaattctgatacaccaaacccgaatgtgcatattggtgcaattgtgggcggaccgaattcatccgatcagtatagcgacaaaaaatcagattactctcatgctgagcccacaacttacatcaacgccgcctttattggacctgttgcagctctaatcagttcttccggataaactcacgtttagattggttgtggggaaacaaatattagcnaagaagaatcattactcatcaacaaactattatgactacaaacttaaataattagtcaggggatgtatcgtttgctttaaacatatatctctatatagatgtatatacctacacacatacacacactcacatatatatcattgaatcgtatatcttagctaaaatgaaaactatttaattacagatgtctatataggttttcttatatcattgtattgtatagattttttatgatacattatatatagttcattcttattaaaaaaaaaaaaa

SEQ ID NO: 557 - DNA, 647 bp, Arabidopsis thaliana
  misc_feature (1)...(647): n = A,T,C or G
cggccgcatggatttattcaaagcatgtgttcgcaatacaaagtttgcagattccgagtttcgtggaaaacacactgagacnattctttacattgttctcttaccaagaacgttttaacagagaaaccttagcttctttttctactcgataagtttcgatccatccttgaatcaaccgtatctcggcttcccgctggtccacaagccatttcgggtcttctggtgttgaaggtcgtagatccaagtgatgtgcaccttcttttgtgacgagagcaacaatggtatcagataagttcttgagaacactgccaccactccaaggatctaacagaccatttgagaaaatgatgttacttccaaatgacttcaaggtggtcgctatatcatgtccaccgaactctgttgtgacccatttgggtcttggattaactcggaatgtattccagcattcctctttgtatgaagagtaattaaaaccataagctggaaacatgctgttttcttggttgctagacatgggcattaccatctccgtgcatgcctgccaattccatccatccaacccatgagggtcatcatccaacttgaagcagtcaacatttccagtatagttgtagtacacacttatccctgcatatatgcgatct

SEQ ID NO: 558 - DNA, 647 bp, Arabidopsis thaliana
tctcttaccggacaccgtcaccgatttcaccctctccgacgatggccgattcgtcgttcacttgcccaattcctgtgagattgaatttgactacctcgttcactacgataagaccatatctggtcgtatcggttacggttcaatcaccgagctcaagggtattcaggtgaagaaattctttatttggctcgatgtcgatgagatcaaggtcgatcttccaccttctgattcaatctacttcaaagttggctttatcaataagaagcttgatattgaccagtttaagactatacattcttgtcacgataatggtgtctctggctcttgtggagattcatggaagagttttctcgagaaagggcaaggaatgatggatgaagcggaaatgttaatcaccgagtaaaacactcttggcagtcacagagtctgcgacaacacgcagatagagttgagtctctaagtcatgtttgtacatatacatacaataactagacaagtcttttctgtaagacttggtatgaaatgtcgatatatccattatgtacgtcttgttaaaactggtttccacgaaaatgttgtatctcatgactaaatgtccccgagttcgttcctcaccaccatagttagactgtgtggccgttaagctc

SEQ ID NO: 559 - DNA, 647 bp, Arabidopsis thaliana
cggccgctaactttcatatgatcttggtagcagaaaaaggccattgctgttttttgagctcaatggcatgtaaaagacagtgatatcagagattgaatgttacaacatgacaagtgctgaagtgagatcaaacaaaaatcaaacttacccgactttgatcgaatcctttattagataatatagctgaagatgtagtaggcacaccagaaaaaaacaatacacaaacttaaaaatgcaataaaaaggggagagagaccagcagttcactttcagaatttgcctcaatggtgatgatcttgaacataacgaaggccgcagtacttgcagatcgcaggctcatttaggtcgaggcatatgaactcgattggatgacctagggccggattggtgtctccttcacaagcaacaatccttccatcaactttgataggtggaacctcactaatcagttccataggtgatttcttgcttctatcctgcatccatttggcggtgtgattgccgactagatcgtctgttggaatgccaagctgtgtggtcgccacactgaaattcctcctggaagatggaagaatctgagatcggattagggctttcaggagattcgacgccattgttccaacaacgagaaattcagaggcggccgc

SEQ ID NO: 560 - DNA, 647 bp, Arabidopsis thaliana
  misc_feature (1)...(647): n = A,T,C or G
acatttcatgacaagtgacgatgtcactacacaacaagagttctgcattccgtctctcatggccctatcgagttcaatgagattgttacaaagacatgaattcaagataaaccacggtgcatggatctcgtcggtgaagccagagtttggtcctggaatatcagaacgaattgaggaagctatcnnnncatccgacgagaagatcgaccattgccggtccgtgaaatctgaactgataacggctctttcaactttgctcggggagaagggtgtgttggtgattccaacggtaccaggtcctccaccgcatctccaagctaatgtggctgcacttgaatctttccgcagcagagccttcagcttgttgtcgatcgcaggcgtttctggattctgtcaggtgagcataccattggggctacacgaaaatcttccggtttcggtatcattggtagctaagtatggctcagacggttttcttctgagtcttgtggattcccttgctgcatttatttgattgacatgtcataaacttaatgcactttgagcatatctattttgctttctgtttattatgtcatcgtagcatatctgaatggttttcttgtcccaaacccaacaatgtattaaataaattgttgtatatgttg

SEQ ID NO: 561 - DNA, 647 bp, Arabidopsis thaliana
  misc_feature (1)...(647): n = A,T,C or G
acgacttatgatgaatagatgaagaaacaatacttgaaagagttttggaatcctcaagcatcatccatgagttctgtccaaattacaaaccaaagttttccaaatcctcgaacatgtttatgatttnnntcgaatctaaattctcatcacagataaacataatcatcttcgcagtccacgaacctctatttcacatatgctatatcgcnnnngcaatgcaagtagatcttcttcttgaatggaaactctcccaacatatacaaatttcttcagcattacagagttctttgcaaagtaccttgctactttcatcacataacgctttctacagagtctgcttcttatctctacaaactctagcgatgataggaaacacggaggcacagacgagactcttgattgttgttccgtctcagcggaagatagtagacccaagacaagggatttgagatttggacagctctcaagaacgcatggcaacatttccaaatcacaatcatagaatctcgcatttaaccgcaccatgttacaaaactgaggcatcggttcgtgcttcaagtagtgacaaatgatcatcaaagttgttccacttatagttaggtcccttatgcttgagagcccggtgagtaatttaccaacattgcttc

SEQ ID NO: 562 - DNA, 647 bp, Arabidopsis thaliana
  misc_feature (1)...(647): n = A,T,C or G
tttttttttttttttttttttttttttttaagaataaaagagcaaaccagacctcgaaaatgataaatcatcgagacagacttgagttgcgtcgtcgattttattcaagccagcaaaagcgataaaaatgtaactagcaacatatccacttaggaaaactatcacagatttatgctttttcaaatagtaaatagctctgttcagaaagtgagcaccaaaatatcaatgttgcagatttatgcagagaagcagcgttgaccacaagaaaaggggaaaggaatgcttatgggagtgtgcgctggtatagtggtagagctcccaaggcctctcgttccttgctttccctctcaacaagagcaagcatgtcctgaagatagccacggaatggggncngnnncgnctgaagatccttggggaggtactcgtgcttcatggagaggtccatggcacgcttgagacgctggttacgagcatcaacgacctccctgggcaatctgttcatagcctctttgatgtccatactgtaatactgatcgtacagatcatcgtacctcagaccgtatctgcgaaggcgagtagatatggctttcatatgcatacgagcgaggaagttcttctttggatcgatgaatgctttcagaagcgac

SEQ ID NO: 563 - DNA, 647 bp, Arabidopsis thaliana
tttttttttttttttggcacaaaggatcattttattataaccagagccttgtagatctggcaaatcatgtagacaatgaaaaatgagaagaaaaataaactctttttattagaaccaagacctcatgaatcttggtcactcacaaagtaaaacataggaaaaacacattgaaacagaaatagcttaaagctcatccttcttgagcgcggatggacgaacaccttgactgaggaaatccttgtaatacttgccggattctttctcgtaacgtgtgaggttatttttgaaatcaacgtagtagagtccaaatctgtttttgtaaccatcttgccactcgaagttatccaacaatgaccatacaaagtatcctgtaacattcactttgtcgatgcaaacagcttcttgcatactcaaaagatgcctctgaagataatatttcctgttatgatcagcggtaccaacagcaacagaatctgaggcccctagttcttctccatatccgttttccatgatcataatttccggatttgcgtatttgtccttaatgtacttcaacagacttctaaaacctctcgagtaaacgttcaatgcagcggtcaaaggcttgctaccaatggcgtaattttgcgcattcttagactcccatg

SEQ ID NO: 564 - DNA, 647 bp, Arabidopsis thaliana
gcggccgcaaagatgtctcaagataagcaagaaagtctaaggcagacctttaaacaaggtgatgctgaaaaagattcagacgtattttcagaaggccatgaatttccaagtaaaatggcagaactagatagtgacactgaagaggagatagtggaagaacaattagaacatttgcagaaagagaatgagaagttaagtctaacctttgaacaacatgatcacatctacagcacaacggagccttctgaaattgtgggtttgcgtcatgcgttataccaaacgcaaaattcacctctacgatcacctctcacttcaccaattcatactcccattggttctccgctgcattacctgatggcttcacaaatacgttctccaatagcttcaacaatgcatagtcacatagtttcaccgcttcgttctcccatcaactcctctggatcactctctgatgtattgttcttcagcaagaaaacttgatggcacgaaaacagataagcattgttccaagctttccccacatacttgaagactttacctgcgatacaaaaacagtgtgtacattgtttcaattttgtttttgagtgattgtaaggttttctacagataataaatcaattcattgagtatacaaaaaaaaaaaaaaa

SEQ ID NO: 565 - DNA, 647 bp, Arabidopsis thaliana
gagcggccgcccgggcaggtattgccaccatcaagaagtaacaatggctgaagctttcacaagtttcaccttcacaaatcttcatatcccttcttcctccagtcactcgaattcaggaccaaatcatggatattggctatctaatgttaatgagaagagggaaaggaatttgatgagaggaagcttatgtgtaagaaaggcattgccacatgatttgccattaatggctgtgatggttcaacaaatagaaggaatgcgtgatatcattacagagaaacacgtgtggcatctaagtgataaagctatcaagaatgtttatatgttctacatcatgttcacttgttggggatgtttgtacttcggttcagcaaaagatccattctacgactcagaggagtaccgtggagatggaggggatggaactggatattgggtctatgaaactcaagaagacatagaagagaaagcaagagcggagctatggcgtgaagaacttatcgaagaaattgaacagaaggttggtggcttaagagagcttgaagaagctgttactaagtagaaaactaacttgtgaatcataaaccactttacatacacattatatattttcttatatcagtcatgcaacattatatatactctctagc

SEQ ID NO: 566 - DNA, 647 bp, Arabidopsis thaliana
ttttttatgaagaagaatcagtaatcacaatagcatcctctgatcaacatagccagggaaatttatttctcgaaagttagcaaaaacaaaaaaaaaactgggttttggaaaagattcatggtgttgttcttatatccaccgaagaagaaaatatttctggggaagaaaatacgagttatgagccctccttctcgagtttctcgatctcttcacgatgctttctttcagcttcttgaagttctctttcagcgtcttcttcctcttcgattctatcaagattatcgaactccttagttgctgccattgctttcacaacagggtctcttaacacagagattaaaccaccaccaattctgtactcttcttcatcgccaatcagaaataaccgttggtcgggaccagatgccattggaatatctaccgccaaaagcttcatgtcatactggcctttcttcttcttaacttcaacgctaacaaggcccttttgctcagaaccctgaacggggaatagaagaaagcagcgcttgctcctaattgttggcttgaatttcttaaatgttatgccaccacctgacatcacatacgctcgtaaatctgatcctgacagaggagcacccataacttctagaatttcagctgccgtgttg

SEQ ID NO: 567 - DNA, 647 bp, Arabidopsis thaliana
gataccaaaacattgtatgtagtaaacaattacacatatagatgcaaatgtatattgtcttgaatcgttgtttcacatcaagctaatattatttcactttattcttctgaattagaagactatgcagagactttgctttgaccgagtagccttcccttaggtttcagaccttgatcttaggcttcttcacgatcatcaccgagcaatgagcatgatgagcgcagtagtcactcgtactcccgagaaccgccctcttgatagctccatatccatggcttcccacaacaagaatagaagcatgatgcttatctacaacttcacataggatattccttgcatcaccttcgaaaacttcgatcaccgcgccatgaaccgatctgctctgacaaattgctttggctttctcgacaaccttagcagcggtatgcttcagatcagcatcaacataaggtacaacctccgcagttccgggaccagcgagaccaacggcggagacggcgttaggtttggcgtggacgatgaagagcttaaaaggataattgggagcgtaaggagcgaagaaacgatcgagcgtccactccaaggcgtaagtgctctgctcgctgtcgtcaactccgacgaccatcaccgatttcccatctccggtg

SEQ ID NO: 568 - DNA, 647 bp, Arabidopsis thaliana
  misc_feature (1)...(647): n = A,T,C or G
caatgccaataaaatggcaagttcagacaaatgtcatttgttcttctttctctataagcaccaaagagccaagagcctcacactttggattcgtctttggttctactacactcctgcgcatatggcttctgaggaccacgcagaacagcaaaactttccttcatctacatgcttaacatcaagacccacaaaccatgaacccgtgctgacgtcatcatgagcatacgaatgaagaatgtctctattgatcgatacaaatctagccaatgcgtgcgttataacatacatctccccataagcatgccggaagtatgctttcttgtcaccgaatttccaccactctggttcataccatttgtggttcggttctgagaagacttcgcctgatttcatgcaaccgatgtaagcncgtgggttttccagatgtgctgcaagcgtagttcccagagcatctatatttacgtagatattgtcgatggcttttgcataaaactgtgcatcccacctatctgcagcataggcaaagnnnagttttaccttcttagaagcttcctcgggtgcctcaactacatcatcgagaataatgaagtcatcggtttgactattttcagtatcaatgctcttgtccatgctgtcccctttatttg

SEQ ID NO: 569 - DNA, 646 bp, Arabidopsis thaliana
aacaaaaaagaagttgcattattacaagggagtattaattaaccaagttactctctagacaaaaccacgttcaaagccaactcatgtcacatctctcctctaaacttcaaagccatcacatttacatcacatctctatccatatacacagatgtgagtgtcttaagtttcaaaccaaagaaacaaaaccagagacgatagacaaacatggtaagagcttaatgaaaacctcaatctacaagggacatggttcgattctgttttgggatgggctctatgatatgtggagagacatgaatgaaacaatgttgtgcacattgatacatgtgaatagtgaagaaagaaacaaacaaagaatgaatagtgaaacatctacagtacttggagttgcaatgcaaatcaatgcattgtcgtgtgaagaagatagctggatatgtttgtcacttgtgctgtcaacagctttaacagaattacctgatttagggtcagagacattatcagctgtgttagacaatctccatgctgctctgttttctcttgttggatttcgagaagaagcacatctggacccagctcttctttggcttaaccattagagatttcgcgtttctcgtctccacaagatcattcatgtattgaacaacggc

SEQ ID NO: 570 - DNA, 646 bp, Arabidopsis thaliana
  misc_feature (1)...(646): n = A,T,C or G
tttttaactacaaagtacaaacacattttactccaatataaaccaatatttatttagtttctaaggaaacaacaaaattgaagcgacattgtcgaatacaagtcctcttcgaccaaaaaaatatgnnngtaataccaannaanncaaaacacacaccagagaacataacaaacatattgtaagaaatataacaagtcttaaagacaaaccacaagaagaaaaaaagcacaaatgatggaggacgaaagagtcagcaatgaacatcattaggcaacggcaggcatgtccttgagccagtcgtcgagaggcttaccaatggagtaaacaatgaaaccaatctcccttagcttttgcagattcataatgtttcttccatcgaacacgaaagctggtttctgcatgttgtcaaagatcttctggaaatcaagattcttgaactcatcccactcggtcatgatgcagataccgtgagcgtccttagttgcttcgtatgcgtcccaagtaacggtcacttgtttcactgttgttgggctcattggctgcaaatgtagaggatggtcccagtcgaacttgttcatggataaatccctctggatctgatcctcagtcacttgtgggtcgtaaatgcttagccttgctttgtctt

SEQ ID NO: 571 - DNA, 646 bp, Arabidopsis thaliana
  misc_feature (1)...(646): n = A,T,C or G
catcaaaactttcatgttccaaacaaatctcaagacatgtccactactgagtatttaatgtcaaaaacagaaaagactggaaagaaannnngagtggccacaaaatgcgtttccttttgagaagaaagcatctgtaaacttgacctttttgcttgatttagttagaatcaagatgcttcttgacaatgtttagtgcagttgtctcctcaccgaaatccttgatcacgagacatgagcatccaacaaccttccttgcattgccctcagaatcaatcttgcaaagaccagcccattcgccgagtgttttggcacttggaacagtaagcaatttgatgctgtggtcagcgcaaagagctttaacaagcttgacataatcaggttggttgcaatcttcagccaggacacagagctgagcattacgcttctcaataagattagcgctttcatggagaccacgaacaacaccaccataagcacgagatttccttacagtcaactccaatgcagtactcacatccatgtcctctgggatcactgctgcctcagcaacaggaggaaccacaggagcagcaacagcctcatcacctgacatattgaatctttgagctggttttccgaacgaagagaagcaaaggtcttttccaaa

SEQ ID NO: 572 - DNA, 646 bp, Arabidopsis thaliana
aaaaaacgtggttacaatcttagttacaaactacaacatcaatttatcaaacaaaaaaacatcttttttttttacatttttctgaagtcattttaaacaacaaactcagaaacctgcttcatttcttttttgtttttttaaagaaaagggtttgcaaatggaagataggccatcccaacctacggccctcaacagtatataagaaaataagaaaaagataccaccagctcgtgaatggaaaaaagcttctcaggtttggaatcgcacagcgggtaggacaactaaaagcaccgcgagcaaacagaacgggaagaataacccgaaaagaaacaaaggaaggtaaatagtcccgcaatgcaagatctgtctatgagagtgtgtatatagaatggttgagacccaaattcttccctgtctagcattctaacgcataggtctgcacctcggccaagttctcatcgggagagctatttggtgcagtgagattggacgcagcagctgtgttgtaccggaagatccttagttttccctcctttgttccatagacaagacctcccccaggagaaggatgaaagcaagcaacattaacttcatcctctgagcttggaagtactctcaccagttccatatctgaaactctgtaaat

SEQ ID NO: 573 - DNA, 646 bp, Arabidopsis thaliana
cactcttgcaagagtcttgagtgacccttcagctccatcttcttttggagcatggatgagccatgtcgctagtaatcatgtgggtgctttatcctttctgctagtggaattctgcctcttcttttctgtcgccgtcttaacagtcatacaagcgtcacaaatatcaaggaacataaccacaaatgaaatggccaacgccctgcggtacagctacctaagaggtccaggtggtcggtttaggaatccttatgatctcgggtgcagaagaaactgctcggacttcttagtaaaaggttataacgaagatattgagtgtcatgaagaagacgcaacacagagaccagagggtattagcatgatgcagatgcagcggaatccaaatcttcaaaatggcaatggccatgttgctatcgatgttaacccgacacataattcacagtcagcacatgttcattctgccaactgcagccatagccataatagtaagtcaaagagtgacaatgttcctttgggtttgggacttggtcttagccgcaacccaacccgacctgttgtatctccataatatggcccgtgtcccaaatgtgcatttgtgttgtaagaaacacgttttctctcctcgagtcattgattacatcaaaaaaaa

SEQ ID NO: 574 - DNA, 646 bp, Arabidopsis thaliana
gcctggtaataaataacttgaggggcacattttgaccattgggatgatacaaaagcttcaaatttgaataaatcaagtagagttaaacaaaggagagagaaactaacaaatcaaagtcaatggcaatacaaacattcaaaagatgatcatcaatctttcttatcattggaatctgaatcgcttgcattataccctggaggcttatcactcacttgccaagctgatgatctagttcttgaagctttgttaatccaagcacgacccttgttttcatctttagggattccatagccgctgcaatacatctgaccaaccaagacctgcataccaacgtcaccagatttggcttccttgagcgtatcctggaaccagcgtctgacgcaatcctcgacgacctgagcgaggggaacccggttaataggatccgaacccgaagccggagcgggattcgaacccgagtgcgatcccgccttctccagcttaaccagattggagtaatcgaggtgtgacgtggtgtctctcgtcgtcttcttgacgaagactttgttccgtggagaaggagaaggtctgtgtggtctggttggattctcggaagagagtctaatggcgaattctgcgaatctgaccatcgattttcccattcaac

SEQ ID NO: 575 - DNA, 646 bp, Arabidopsis thaliana
cggccgccaaacgaagaagaaggaagaataagtgaaccaaattggagcgaacgagtggaggatctcgtggtagccggcgacgtcacggcggcgatctcctttctcgagtctttggagaccaatcttcaatcgcggttaggttcttcctcctccggcgagagaacggagtttgggcttcaattatccgccgctcttacgcagttggcggatctctactcttctgagggactttcccttaaatccgatgagcttcgaactcgctcttccctcattaagcaacgagcgttggattgtgatcttgcctcttcaagaagttccggcaatgtagagaatcaatctgttgcttccagtggactcaagtctgacccaaatgtctcaagctttgatgctgatgggaaaacggaggattccaaagtatctagcagtaattcagctgctcatgattcttcagatgatgattgggaagctcttgcagatgttgaaccgagtaagttactccccgtagaagagttgcctgaaatatcaaagctatcggttgaagaacctaaagttcaaggacctaagagacgtggaaggggaacgtttacttataagagtgatgcaatgtacagtgatcgagatttctctgagtcgaggtttgatgatg

SEQ ID NO: 576 - DNA, 646 bp, Arabidopsis thaliana
ccgaagtccgacctagtaaaggttcaggggtacaagccttcgcctctcgtgcatttgatgcttcatttagctggaaggacattgaatggttaagatctattacagagttacctattctggtcaaagggatactcacccgagaagacgctcttaaggctgttgaagctggtgtagatggaataattgtatctaaccatgggggtcgccagctcgactattcccctgctacaataactgttttagaagaggttgttcaagttgttagaggtaggattccggttttgcttgatggaggagtaagacgagggacagatgttttcaaagccctggcacttggagcacaagctgttcttatagggaggcctatgatctatgggcttgcagctaagggtgaagatggagtgaaaaaagtgattgatatgttaaagaatgagtttgagattactatggctctttctggttgtccaaccattgatgacataaccagaaaccatgttaggacagagaatgagagacttcactctatgctctgatccaaaaaaaccaacagatatggtctgagaaacttaatcagacagctgaagaaccgtggcaaccagcagccatgttagaagaacaaggactgaagcatggattcaattcaaca

SEQ ID NO: 577 - DNA, 646 bp, Arabidopsis thaliana
cctctagagcggccgcccttttttttttttttttttttttttttttttttttttttttttttttttttttttttttttttttttgagattgagaaccaaaggattattagaacaaacgttaatattcattggggaacgaaatccttattgaaatgtgcgttcgcatgattcaaaaaggccataaaatccatttccaaacaaatgggaataagataacgtgaacaaaaaccattccgttgctaagtttcagaaaaagaatagctgatttcaaaactcagagaaaataaaagagtaatatagaacgctcttctttgttattgaacatgtttcaaagaagctgaagcattcactatagtcccaaatatttatgccttgtcagcttctacattttgcttcagtgaatcacctactgtgttgctggacgaacttggagttcttagcatcttcctcagtgagaccggcggttagcttggtgatgagaacgccggtgacggcgaaaccggtgaggaatggccagcaacgtttccattctctcttgaagaacactggccatggatcgaacaacctcattttctctctctctctctctctgcacagacaaacgattatctttcccttaagttttgttgttgttgcggacgcgtgg

SEQ ID NO: 578 - DNA, 646 bp, Arabidopsis thaliana
  misc_feature (1)...(646): n = A,T,C or G
acgttagatttccctgcacctgaccaagtgaagtaacaaaactcataatatacaaagaaaactgttcttgaaacttcaagtgaactagactgcactagactagactagactaggccggtttctattctgtcaacaatcaaatttatagctgcattagcggatgtgaaagctccatggaagctttcttggtatgaaatggaagttaaatcttgagccatcttcaacaaaatctctcccatgtcactttctttctctagcagtgaactatagtaagactttgcagctacttcactgatctccacattggttggctcagggcaatactcatcatccaaccatttgtgcaaagttactctcaaccattcagattcctcaatggctctagaagggagcaaccactcttctggaatcgtgagggcttgtacggctgatnnngagtcttcttctccttcatggatcgacgattgagacttttggagtttcaaagacggaaatttcggcgcagatgttatcggaaagctgactgatcttctccgaatcgtcgccggaaagctgactgatcttctccgaatcgtcgccgggaaatcaaggtgtttggttaatgataaaggatgtgactttacgacgtttcgagttacggaagagc

SEQ ID NO: 579 - DNA, 646 bp, Arabidopsis thaliana
cttttttttttttttttttttttttttttttttttttttttttttttttttttttttttttttttttttttatcgtgaaataaactgggattgttctaaaaagcattctacacattggcgtaagagccattctttttgtacatgtgaaaggaaaaactctaaaatcctcaccatttttctttacaccattctctgccttttatctcactcactcatcagcctaagggggatctttggttctatgtatagtcaaaacggtaagaaactacacaatgtacagattttgcggagaacaaaacaaagctctctctcattatttctccgcagatttttggtttagatcttacctaattctcaaaacgttatggcagagccatccaccctagttaagctgtacaacacttgcggccttacgccaccagaggctggggtaatgactgcaaagccattctcctctctccagcagcaacgagtttttcaacacgggcaacgatatgctttccgtaagtgtatttctttagagcattcagatgcactttaatacgagtcagtatcagttcacgctgttggtcatcacatgtctccaggactttttgcactacatagtttgcaaactgatccttcatcatcgcctgaagaggctcgt

SEQ ID NO: 580 - DNA, 646 bp, Arabidopsis thaliana
  misc_feature (1)...(646): n = A,T,C or G
taacgaattttacatatataacgaaataagacagacattttagtattttacataagactgaagatgaaacaccacgaaaggggattaaacacacaaaacataaactaaagagagattcaagaagctctnnnctttttcaagagctaaagatcaaattaattaactaattaaacattcttaatccatcctcattagattagttgttttattaagcttcctgaatatataatctcagttcgatgacgactggttcaagggactcctcccacaactcgccggctttggactattcccgacgactcgaggactcatctgacccaacctgattccactcactcttggactaaacacttgtgacaaactccgattattgactggagtcgaacttgaacttgtcaccttaggactactcgtgtgtctaaactctcctctgcttcgggtcataacctcatcaagaatctccaaatctcccggatacgatgttgtggatccaatctccgtttccgctgcgagattgaagggtaaagctggagcttcttcatactctgctgcatctaagtcctgaagatgagctcctttgaagaatctagggaggagatattgtcgtacggggattaagaacatgatcattaaagggaacatgact

SEQ ID NO: 581 - DNA, 645 bp, Arabidopsis thaliana
ctttttttttttttttttattagctataaatagaaagacgattctcaaataagaatcttgtaatgttataagacagagcttatatatatatataagccatgagactgtattttcacaagatgttttctcatgattcgtaacttaataacacttacaaattacagatgcatagacattaatatagtgcgaaacccgcttcttgtttgatcagtccacgcattttttcggccatgctgaatcgttctgaggttcggtattccagccatacgggttggcgcttggagtaacatggtgattttgcccatttctaattctctgcaagggagagctggtttgggatggaggagcagcgaaattgtttccgagtcttggaggtagaatggttgggatcccgatgttttggtttgacatatggtttaggtttgagtgtggttgataagctggaataatgctagaagaatccatcctgttgttaccagttattggcattctgttgttgttgttatgtccacttgatcttccgagaagcatcggattcattcctgttactctcttcacggtttcttccgccattttcaccttagctcttaatgtctcaatgtcagcctttagtattctattgccaacagcagcccggacgcgtgg

SEQ ID NO: 582 - DNA, 645 bp, Arabidopsis thaliana
  misc_feature (1)...(645): n = A,T,C or G
tttttttttttttttcagcacatgaacttttttgtttcccataaattgaaagtttttgaatttngnnaacaacactaagctacttgatcattgaagggtatgagtaggaaaaaaaaaaaaagaactcagatgatcaaatgaaataaatgtaagaacaagaagccattgtcttcgataatcctccttcgtcaattgagcttcagatcaaccacaagcccatcactgaaagtggagaaccagtttaggaatctgctatgaacatcttcaagctactgactctgcggattctgttgtctactatctcacacggatgtgttcaaagagttcccttcagtgttgttgttcttgaagaaaaaagagtttcggtgtttcaggacttgagtagaagctctgaagcaagtctcttcagtgactccgacgctttaagaagatcggattccgaatgtcccgctgagacgtagagtttgattcccacaggtaaccggcatttatcaagaaatgatcttttagaactcacaaccaacaatgagtcttccttcagagcacggtcagccattttctcaagtagaagcaaatcatctttagctgaaccgctagatttctctaattttaagaaaacaataggtgattcccggttgcttgtta

SEQ ID NO: 583 - DNA, 645 bp, Arabidopsis thaliana
caaatatagatgtctcgcagatccaattcaacttctggatctttttctcaaacgctctctgcgcacttgccttaaacttctccatattcttagtaatcggaagaacaggcgctgtaacaatccgggttgctggggttctcaaagactggattctcatagccctctccactgtcatatttcctgagtccacaatcactgggctgaatataactggatatgctatagcgctctgtggtgttgtaatgtacaattacataaaaatcaaggatgtaaaagcgattcaaccaaccactgacagcctcccagatcgaatcacgaaggactggaaggagaagaattcgtcagatggggggagccccagaggattggagcttaacgatgaagaagcccctctgataacgtcgcggttgtcgcatattggccggactcagcttggaaaccacacggcagtctgagaatgaccgttatgttgtttcacttctcaggtgaaaatgtcttttatctcttttggaacccaaacagttttaaatagaatttacctcggattacttaacattgttagttctacaaaaaaaagaaacgcaaaattatttgtagggtctctgaaagttataaatgttttcactaaaaaaaaaaaaaaaaaaa

SEQ ID NO: 584 - DNA, 645 bp, Arabidopsis thaliana
ccacgcgtccgaagaatttgcaaatgccatcgactgctattctcagttcattgagggtgggacaatggtttccccgactgtttatgcaagaagaagtctgtgttacctaatgaatgagatgccccaagaggcgctgaatgatgcaatgcaagcccaagtgatatctccggcttggcatatcgcatcctatcttcaagctgtagctctatcagctctaggacaagagaacgaagcacacgctgctcttaaagacggatcaatgcttgaaagcaaaagaaacaggctatgatgatgataacagaaaacacgaagaggaaaatgagagaggaaagttagaccatttatcttcttacattaaaccgataggctttgtaggataagttcaaatctcatcctctgaagtagaagctactacagagttctcctatcgtgttcatcatcatcatcatcatcactggtcagtttcgggttccgctcgtgtataccctttccttctcttttatttcttattggaagcattcatttggtctactaccgcgaattagactctttttatgttcttggttactggcatgaacatttccctgctatacagaagaagaaaaaagtttcataatttgatggagatttgatttttagaaaaac

SEQ ID NO: 585 - DNA, 645 bp, Arabidopsis thaliana
  misc_feature (1)...(645): n = A,T,C or G
agaaaatagtgaataattctatttcaatccaagtaataaattaagcggtaaatatcaactatggtatttacagagaagaaataaagttagaaagtaaaagaaggaaaaatgaatacgagtcagaaagtaaaatcaaggagaaatagacatcatcaatgtgtcatcgttcaaaagagactcaatgtcaataaaatcgtcttcttcacagttgactgcttcttcttctttattgtttatagatgcacttgatgaagcctcattttcacggaagccctcaacaaccgttaggagtctacggtattgatcccgtgcttctgggtattgaaccatcgacttaacacgagtcagagccttctgtagcctttcctctgtttgttttcttccctctttaagataatcatactcatcttcctgtgggatcctaggacatatagctgatacaggcggttccggttccacggttttggcgactgcattgcgtttaaaccctctcaaaccattacctttgcgtctccaacgcaaaatgattttctcgagtaatcccacagaccagatgactgttcggtattgnnnccggacctgatgtcctctcacatgagcctgaattttaacgattctttgtcggattaaaagaaactcttttct

SEQ ID NO: 586 - DNA, 645 bp, Arabidopsis thaliana
tttatataatttgcatggttattaaaatacaaaaatacaactgcacagccacaaactcgtaaccacaaataaaataaataaattgattaataataatctaggcaaattaattatagcaaaatacaacatcaagtttaaaaaaaaaaagacgaattatacattcattatactccattgcacaaaagtaaaaaaagaacagacaaatcacaaaatctcaaccttatatgaatcattttatcgttgacgcttgtatttgcaagaaagaggaagagaatcttctgaagaaggtcccatgaaattacggatctgagatcggagtttgaagaaaacgtgcattatacttcctctgttttgtgaaccaatcgatttagcttcgtctttgttaagctcaagatctctgatgaatataggttttcttgaaaggatccatgaccaaccccattcccaccattctttcacagagcttcctgcttgttctcccatggcggaaacagatttggatctcgggaatctagctgcgatcgctgctggttggtttgagaggttgagtgatagagaagagagacgacggcggatgagaccaggctcatcgtcggcggtggctgctgcattagggcgttgagaaacggggagggaagtgggttt

SEQ ID NO: 587 - DNA, 645 bp, Arabidopsis thaliana
attgatttctccatgaacaacgtcctcctttgatttcacctttttttgttgtcttcttctttcgaaatcaatcatgagattcagatctctcatctctctcctcttccttctcttcttcacttcatctgcttacgctcgattcgtctccctaaacccatcttcaacgagtctaatctccgatggaatcgacggtggttcaaatctcgccggttccggatcggttatcaagtcggttgtttcggctccggctgaggaaaaggaggaagcttgtgagcagacatacgggtttatgccgtgtactaagaccgctcttggaaacgtgtttctgattttggtttatggatttctcatgttcacggctgcgacgtatctctctgctggaagtgagctacttcttgagatccttggacctggaattgtcggtggtttgtttcttccgatgcttggtgctcttcctgacgctatgcttatcatggtgtctggactatctggagatgcagcaactgctcaaagccaagtctctgtgggaatgggtttgcttgctggttccactgttatgcttctcactgttatctggggaacttgtactgtggttggcaagtgtgatcttcgtgattcaattgctgtaaacaaccaagacaccaa

SEQ ID NO: 588 - DNA, 645 bp, Arabidopsis thaliana
gattcgaaggtttataaaaactcaaaatcgaatcttatccacaagaaaacaacaaggtacttttccaaaaatgaaggcggagttgaatttgccggcgggattccgatttcatccgacggacgaagagcttgtcaagttctatctttgccggagatgtgcgtcagaaccgattaacgttccggttatcgcagagattgacttgtacaaattcaatccatgggagcttccagaaatggcgttgtacggtgagaaagaatggtacttcttctcgcatagagaccggaaatacccaaacgggtcgagaccaaaccgggcagctggaaccggttattggaaagcgactggagctgataaaccgatcggaaaaccgaagacgttagggattaagaaagcactcgtcttctacgcaggaaaagctccgaaagggattaaaacgaattggattatgcacgagtatcgtctcgctaatgtcgatcgatctgcttctaccaacaagaagaacaacttaagacttgatgattgggttttgtgtcggatatacaataagaaaggaacaatggagaagtatttaccggcggcggctgagaaaccgacggaaaagatgagtacgtcggactcaagatgctcaagtcacgtgatttcacc

SEQ ID NO: 589 - DNA, 645 bp, Arabidopsis thaliana
ttttttttgagatgaagtgaaatgtatatacattttcttattaacaggacataactttttttcttttctctacatacaatcttgcaagaaagtggacaccaaacatacacacgcaaacaaaacatcaaccaaccatcaagcaatcacaaaacccagtcaattacactcggatctcacgtgtttctaccgcttcataagaaccgatgaacacatcaccgtagataagtcccgcgagtgcaccacccacaagtggtcccacccaatagatccagatttgggacaagtcaccactgacaacagctggtccgaacgaccttgctggattcatggagccaccactgaatggaccagcagcgaggatgttggcaccaactatgaagccgatggcgattggagcgatggtccctagcgatcctttctttggatcagctgctgtggcgtaaacggtgtagaccaatgcaaaggtcacaacgatctccatgccgacaccttcgaccgctcctaaaccggctgagaccccgtgggtcggtacgctcttgccattagtaacaaagacgaggagaagacaagcgacgatggagccaagacactgagcaatccaatagaagaaacctgtgatgagtgttatgtttccgccgatggcaa

SEQ ID NO: 590 - DNA, 644 bp, Arabidopsis thaliana
tttttttttttttttttttttaaggaagaagatggattttataatctactcatccgcggaacacagaaagacagtttgttctagcaaacacaaacatttcaaaactcaagaacataacttgtgttgttcctgtgtattaaaaccaagcggagtcaagccttttgagtcgagtagccaaggatcaaatcacggatctcttcactgttggctctgtcgatagcggttcttccatcagcgtccttgaccgaataatcagcaccggctttgagaagctcctcgatcttaggtctgtcaccttctgtagcggctaacatcaacaagatatcaactgggtgaatgtttaggttaagaagagcttccatctttgaataggttccttctactgcaagcatacccatgtagttgaaatactgttcgacgtcgtctctgtcgaaatcatctcgagactggctgccatagattccggcattttcagcatcgacaccattcttgccgaacttgaaccagcaagtggttcttgaaccattggagggtcctagtctggcaggtcggatccgaagctttaagtttcgggttccgagaaatctagaggagagcagccttggggaagaagaagtggtggagaagagtgaggtggccaaaga

SEQ ID NO: 591 - DNA, 644 bp, Arabidopsis thaliana
ccacgcgtccgttcttctttttattttgcattccttcgccattaatcgccgccgctaacgatgacgatataccgacggcgtacactctcctccaaagctacaactttcccgtcgggattcttcctaaaggagtggtgtcatatgatttagataaatctactggtcaattccacgcgtatttcaacaaatcgtgcagtttcgctcttcaaggctcttaccaattggattacaaatcgacaatctctggatacatatcggagaacaagatcacgaagcttaccggcgtgaaggtgaaagttctcttcttgtggctcaacatcgttgaggttattaggaacggagacgaactcgagttctccgttgggatcacatcggcgaacttcgagatcgatgagttttacgagtcgccacagtgtggttgcggatttgattgcaaaacgaagacgaagactttgggaagaaacccttttgtttcttcggtttaaaggttaagacttcttattgcagaatctgaactctttggatgatttatgttctttctccaatcatttaatttttcaatcaatgctttgtttgtatctcttcttaggatcgaaccgataagttgtatttatgaaccgatcaggaataaaacagtggtggaa

SEQ ID NO: 592 - DNA, 643 bp, Arabidopsis thaliana
  misc_feature (1)...(643): n = A,T,C or G
gatagctgaagccttggaactcaccggccacaggtttctttggtcaatacgtacaaatccgacggagaaagcgagcccgtacgatctgttgccggagggatttctcgatcggacggccagtaagggattggtgtgtgattgggccccgcaagtagaagttctggcccataaagcgctcggaggattcgtgtctcactgcggttggaactctgtactggagagcttatggttcggtgttccgatcgccacgtggccaatgtacgctgagcaacagttaaacgcattctcgatggtgaaggagttagggttagccgtggagctgcgtttagactacgtttcggcgtacggagagatagtaaaagctgaggagatcgcgggagccatacgatcattgatggacggtgaggatacgccgaggaagagagtgaaggagatggcggaagcggcgaggaatgctttgatggacggaggatcttcgtttgttgcggttaaacgatttctcgacgagttgatcggcggagatgtttagttctattataaacgtcgtcgttcgtgcgtgtttnnnnnnnaatcgcttctaacttttttgggtacaatttcaggttggtttggatttggttaaagtcggtttaagtttagacat

SEQ ID NO: 593 - DNA, 643 bp, Arabidopsis thaliana
tgaaatctgacattggtggcaacataacgaggttggagaagaactacttatctgatcccgacaagttcaagtacttgtacacctttgttcaagtcgaaattgagtctaagatagcaaaaggatcgtctagctgtacaaacggtcttctctggttaaccagagcaatggatttcttagtggagctgttccgaaacttggtagcacatcaagactggtcaatgccacaagcttgtgctgactcataccaaaaaacactcaagaaatggcacggatggctcgccagctctaccttctctatggctttaaagctagctccggacaggaagaagttcatggatgtcatatctggttctggtaacatccaagccgacatggaaaggttttgtgctgagtttggtccgtttcttcatgataatcataagtttctggctagcgtcggtatggatgacatgaaagcttcttaagtcatcatatgattatcgccggtatcaaatcttctttgccggaatctttgtctgttttaacttttctccttccaattatagaacctccaaaaagaaacagaataatgtgttggtttctatctgaatgttcactttatattacaagttataacatacgaatcaatcttatcaactcttct

SEQ ID NO: 594 - DNA, 643 bp, Arabidopsis thaliana
attcgcggccgcattcgttaatagtaacatcattacaatatagtacatatagcaactttaaataaataaataaaaaagattacaataatttaatattctatctaacaggacgaaatatcatggctcaaccttcatatttgcagctggaagagatgctgtagctgctgcttgagggtcaggtgtgacatcaccagctccatagttaatgtggatcacattttgcaaatcaccctcccatccatttgtttcctgtcgcttgaatccaccattcataggagacaatggagaggtaatggtccttccaatgctggaaagagtttgttgcatgaatccatgaggtagaggaggataggccattgacatatttggtgggaatggtgttgtagatgaagaaccagctcgtagttgaagtgcatcttttgcaagaagaccttcaaggttaaagtccatttgtgggttcacagttgcaagtttcatcgataaaaactcaacttggcgttgtagtgattgtacgtagtttatgatttcgtcaagcataactgccttcccagtcaccttgttgcaacccggtactagatcttgaagaaacttcatcctttcactaattttttctctcctaactctttctgcaagactatggcta

SEQ ID NO: 595 - DNA, 643 bp, Arabidopsis thaliana
ccacgcgtccgatggaatgtgttgaaagcttgtctaagaacaatcataaactagagacacttcacatcaatggcgtcaatggctttaccaaacaacatctctcagcactgtatacttacctttcttccgagggaacgattgacctcgaggtctgtcccaaatgcgatgaagtaaggatgattccgtcttgctcaagagaatcatgtaaccagaagcaacgcaagtgccgtggatgctggctttgtatccctagatgtgcagagtgcgcagtgtgccttgttggttcagatactgagagtcaagaagcagcgtgtggtaatgatgatgttctgtgtcttgaatgttggcttgtgcttcccaagtgcagattctgcaataaaccatattgcactaatcacagtagtcgtcgacatgagattgcaatcactgatgctgcatctcggccttcgtttgaatgtgaagcttgttactatagggcaggtacaaacccatatgaagtcgactatcaaatctaaacaaacactttgttgtctgcaactttgtctattttgtatatgacaagcttggattgtgaaatattcagccataaaaaagaaagaatcaagctttcaacaaaaaaaaaaaaaaaaaaaaaaaaaaaaaa

SEQ ID NO: 596 - DNA, 643 bp, Arabidopsis thaliana
tttgggggaaagtaaacacacatgaaaatagtttttagtctttacttaacaattacaagaaactagaagggtgaacacttttgattcatgttctcacatgaaaatggaaatgagaagacgaaagattgattcttccttcagagtgaaagaccagattcttcatcctcctcgagagatgaagtgtagacgaagaagaaagtccagatcaaaccaaagactccaaacagaatccaacccaagaggttgttgcttagaccaaagggtaatcctgttccttctgttgacatcctctcatcaaccaaagccatcgcgggattgctcatcaccgccgtcaaagcagctgttgctgcagctgaaactccagcccccatgactgagacgtttccttgctttgtctccattgaacatctcactcctcccttcttcttacccattggaggcaaaccaagaacaggagcagagatggcgacggtaggcttgagaaggagagccggacgagcggcggagacggtggaagcggaggcagtaaagctagccatttctctatttgcttcccctaacgactgagagactcttcaattgattttttgtttgttctgtttgtgttttacagcaacaagaacacttttaatcggacgcgtgg

SEQ ID NO: 597 - DNA, 643 bp, Arabidopsis thaliana
ggctgcggccatttttttcttctttctctcttctattctatctcttaaaccctagatttgatctgggtttttcctgattccatttagggtttctctatcttcttttttttcttcttcttcttctttctctttggtcgcatccccttttatccgagaaggatctatccaaatctttgtttgtcgaatctcctctcatggctaccgttgctcctcctgctgatcaagctacagatctgttgcagaaactatccttggactcgccagcaaaagcttcagagatccctgagcctaacaagaagactgccgtctaccagtatggaggcgttgatgttcatggtcaagttccttcttatgatcgatctttgacaccaatgcttcccagtgatgctgctgacccttcagtttgctatgttcctaatccttacaatccctaccagtattacaatgtatatgggagtggtcaagagtggactgactacccagcttacacaaatcctgagggtgttgacatgaattctggaatttatggagagaatgggactgttgtgtatcctcagggttatgggtatgcagcgtatccttactcgccagcaactagccctgctccacagcttggcggggaagggcagttgtacggtgctca

SEQ ID NO: 598 - DNA, 642 bp, Arabidopsis thaliana
cttttttttttttttttttattgtaacattattattcagttttagagaaaacgatacattattcaaaagcaagttcattatgatcttttgttacagattcagaaccaaagttttgactttcttaaggattgagattgcatacagccactgtctcccatgtctctagagtcttgtcctcggtatcggttttgcatagagcaagtcggtttaaccggaaactgagtccatcgaggctgctatcgagcgtgtaagctttctcctgcgcattcttcttctcttcctctgtcaactcagcgtaaagcaggctcaaatgcggcatgtaaggtgtggtagtggaacaattgaaatggttcttacagtgttcaccagcttccattacctcaggggtggtttggagaagcaagaaaacgcattgaaagaagaaagttccggtggagacgcgatcaacggtggcggtgtaagctttaagaccgtcgcaagctgattcgaacatcttcttggcttcgtctgccgtcagataagcagatacggcgacggtgacgtgaggaacgaatcttgggccagtgaattcggatctcaaagcttccattagctttctgaatcggggctccgattcctcatctggtaatgcccaaaccgagt

SEQ ID NO: 599 - DNA, 642 bp, Arabidopsis thaliana
atataatcgaagcttcaccaccgtcggtgaccgtagagacaaaacaagaacaagtacaagtacaagaacaagaagtaaaagaagaagaagaagaagaagaacagagtcttgaagaggtttatagtaaacttaatctaaaccatgtcgctaggacaaaatctgacactgaaccagctgctggaattagacctccgaagcttccaaagaagatgaaaaaatctgctagtaccaaatctccgttctctcactttcaagaagatgaaatctccgtggaggctcgccgtcctgcgacggtgaaagtgccgagagttacgacggtggaagaagctgatgaagaagtagatgcaaaagctgatgactttatcaatcgattcaagcatcagttgaagttacagagaattgattccatcactaagtataaggagatggtgaagaaaagaaacgacaagtgaaaaattgataaaaagaaaactcttgaggctgtttcttaactatgtattaatttatggacctttttgaaaattcttaattttggttagcttttttcaatttcacatcttcactgtagattatccactggctttttgttgccggaactgtttctcttttttctttataacaagaaaatgaaaattcgagaat

SEQ ID NO: 600 - DNA, 642 bp, Arabidopsis thaliana
cttttttttttttttttcgtagagcactaattgtttggttacacgcatcaacatatcaagcaatacacaacgtgaatacacacacccacgaattttttttaaaaattacaaataaaaatgaagcaatgtgattttcaataagaaggctaaaacacgcaaagctcacttcaacgactgtaaagtagaagatgtagtgacaagactagacaagagaccaacgaggagtgcattgttgtaagtggttggctcgttctgcattgggttctctcgtgagtcagtgaacgtctcattgaagaaaggcccacctacgagtgcaccatatgctatgtttgggtttggtttcgttgagttaaaccatttgaatccatctaagcaacccgttgttgcatctgccgggatcgaagctcctctatgatgcacaaattgtgggtatttgtctccataacccaccacgaagctcgttcccaacggattcttccccagcatgtaatcagcctgcgatttggcgaaatctctaagctctgttgctttgaagattttcccgtcgcaagatattttatggatacgggaagtgagcatgtaatcactgaaaagcgaggctaaaaacgctgacgaaacggattgttgcatcgagttccattc

SEQ ID NO: 601 - DNA, 642 bp, Arabidopsis thaliana
ttttttttcgttttttgattaaacaccaataatattaaacgataatgtcttaattcaaaaactcataaaatgtaacacaaaatcaagttcttgaaacataaagtagaacagaacaagacttaaactgaactatcaaaaaccatttcaaaagcttgaagctttttgtatgggttgcttaagatcttggcttctacttcttttccttgaagagggccaagagtgaaacaccagaaaccttcacgaccttgaacctaactccgggaatatctcccacagcgtgacccttacgaccaaatccagcaatcaagacctcatcgttttcctcgatgtagttcaaacaaccatcattggggacaaaggcagcaatcttctttccattcttgataagctgaactctagcacacttacggatagcagagttaggctgcttagcctcaataccgattttctcaaggacaattcctttagcgtgagaagaaccagcaaaaggcttcttccactcatttcccaagtgagacttcttgtactgcttgtcagcccacctctggttaattcggagtctcttcagcttacgcccagctcccataccacgtgtcttacccatgtttgttgatggaggagaaagatcaacaacaaagagct

SEQ ID NO: 602 - DNA, 642 bp, Arabidopsis thaliana
  misc_feature (1)...(642): n = A,T,C or G
gcggccgcttttttttggcataatgttaatagctgccaaaaaaagaagaaggtatatattaatatacatatctatcatccatatatatggaatcatatctcaacttgcgtttggtacgataaataaaagagaaagggacaacctaaccaacgcttataatttgacatgacaaacaaaaaaaattataattagaatctctcatctttgagccatcactagctgtacgtatggctctttctgtcttacccaccaatcttgtttgcttctcttctctactatttgttaataagatcatttgtttacttctctgcttcctctttgcacaaacagttttgttctttgaaatgatctattaatgatcttcaagtgagatcggagaagcactatcatctacagtagccactcggatcgggagcctccgcttcatcttcacagtcggaaatgacactatctcgtcttcctcagccgtccaactgtaccgggttacaaggtggtgaagaaagatggatatttcgagcttcgacagctctaaaccaggacatagcctttgcccaccaccaaagggtgtgaagcaaatactgctgtnnnccgatccattaattctgtcccatctccacggatcgaattgatagggattatcat

SEQ ID NO: 603 - DNA, 642 bp, Arabidopsis thaliana
  misc_feature (1)...(642): n = A,T,C or G
ttttttttttttttttttttttttttagggaaaaattacgtgaaataaatcgaaaaaatatctcacaataaacagattctgatgcagaagggagctaataagttcagccaaacacatgttcatgagaggttttaaagttcattgacctctttgcctatattacactattccaagggagagggctaaattgattttaaagagaagcaacctggaacacaaatgcgttgaaccaaatggaataagcagagatcttcaaaaaccaacaaccggaagctgcaggaggagctgagtatcttcaaaggaaatagtcaggtgtccttcgggttacatctggctctcctctcctcggtgctggttcaaactgaatgaacgtgtggttcctgcagtcatcgacctcaagaattgaggccatgtttccacagcgatnnnnatagtttggtgcactgaatatagtaaccactttttgctcgtgtgcccaattgaatccatccataacgagctgatgcgctcgggcgatcagctttaagttgttagtgtgattgaattgttccgaaatatcctgaccaaatgtatatccagcaccacgaggagagattccccagccacatctgtcatcaggatcagaccataataagtcacaca

SEQ ID NO: 604 - DNA, 642 bp, Arabidopsis thaliana
  misc_feature (1)...(642): n = A,T,C or G
acaaaaaccttggatcatatgtttctctaaactcaaaacataaactgaccaaaacaaaaataaacgaaaatctcagatttcagtaaacatgtctagttggagaaacgatctaacagcggacaaataacataaaaggtgattgattatggagaacaagaacccacaagataaagattctctcttcaggatctcacttcttcttggcatcaccagcctttgtcttcttaacaccacggattttcttcgccctgttcttcctttccttaatttgtttccttgacttctcaatcttagtgtcaagtccattcctgataagtctgtatttgggttcaaacttcttagcgctctcaacagtatcatagatcaaaccaaacccggatgatttaccacctccaaagtgggttctgaatttgaatacgaagattgcatttggatccttgacctcgtacatccttgctagcttctccttcagctcagcctttgaaacattggctcttccagggtgaagaacatcaataacgaactgcttcctggagagaagtctgttggtcatgaatttcctggttcggatggtgaccgcnttttcagccatttttgctacttctcaaggattaaagtgaaagatctctgcaagcttgagtg

SEQ ID NO: 605 - DNA, 642 bp, Arabidopsis thaliana
tttttttttttttttgagacaataatgatttgtagattatattagtaacaatttattatttatcagcaaagacagagagagagttcacaaacagcatcataatgtagaagagaaaacaaacaacaaacaaacaaacaaaaaacttaaatacaagccttaagaaactatcaagggttgtgaatagtataatctgcaggtttcttcaacaaaacttttttaacggtagtttctgtacacagggctgtacatgctgctctctgcaaacttgacaagatcctttgcacgtggcaggttcgacgccaatccgaggtcataggttttggcggcgacacaggctgcaatgttagcagagatctctctgatgtttgagaatggcgggtagatcagaccattggcgtaatgctcttctgtcacttgtgcggccaatgcttcagaagctgcgaggagcatgtcatcacggacacgaattgccccagacatgatcaaaccaagacccagaccagggaaaatgtagcaattgtttgcctggccaggcaagtaggttttgccatcgtacacaacaggatcaaatgggcttccacttccaaagattgcacgacccttggtccatgtgtaagcctgttcagcagtacactcagcttg

SEQ ID NO: 606 - DNA, 642 bp, Arabidopsis thaliana
  misc_feature (1)...(642): n = A,T,C or G
ttttttttttttactcagagatcgtaagatcgtattctgcttttattttgagcaacaagcaaacttgtcttnnngttttagtagatagaacttgttattctttcaactctttaagttatttgaattattgagtagtgagtttttttcttctcagaagtggcctaacttctccacaagcttgnnctctatttccatcctcttcttcatcaacaaaccataggtggaagcaatgttcgcgtctcctgcttttaccttgagcttgcagttcagagatgttgtttccaatttcccttcgtagagatttgagattggtacaaagcttccttttttgttgcagagccagccatgagcagctcttagtgcagctccaagtgatgctgaatcaggcctttggacagtatatacatcacatccgaagattgctgagatcagactcaagatattctcgttagcagatgcacctccggttgctattattcggaggggaggggagggcataccaaatctctcagtatgagcccgctttgaaagaaactgaccttcaatcaatgccctaacctctgagggagggtcgaactcaccgacctcttgttccttcacaccctcaagagactcaccagagaagttctcaagaatgtaacg

SEQ ID NO: 607 - DNA, 641 bp, Arabidopsis thaliana
agtttatcaaatggatcattttttcattcaccaaaacttacaacacaaaactaactaccaaagtgaagatttggaggacttgaatatgccaaaaggaaactcaaatccaaaacaacatctcaattctaattacatacaaatttcacattttttaatgtaaataaaaccacacaatgatacaaccgaacatgcagaaccgatcaaacttcatgactagtttgagtagatgtgggaggaggaatcactttaccacgccccattgtgaaccctctcgtcccatcaggcattctcgggccaggtggacgctttgagacctcaacaggatgataattatgatgagaagatgatgaagctgttccatgtccgttgccgccttgatgattctgtcgccttccttgtcctccacctctgcctttgtttccatttttattgccaccgtcgtcatcagcaggattatcagaatgatggagacggtgattttgatgttcacgcgtctttttgtttttatctcctccagtttgatcatgaactcggcctgtagtgtccttttctttatcgacttccttcctagctggtcttctctgtgcaaactttcctgctgcttgttcaagaagcttaactcgcaacccatttctccagtc

SEQ ID NO: 608 - DNA, 641 bp, Arabidopsis thaliana
ttttttacggtgtgaaaacaaagtttgtgacgctgaaatgtgcccgaataggtaagatatcatttgaaaaacctcttccttatctcatactactctttcaatatataatcgaatttttttttaatctaaaaaatttcatattgaattcgaagtgccatgctattattacttaactaattcatatttcaaatggcgaaggcatagtatttttttctcgaaaataaaaaaactcattggcgccaagcgtgagggaatgctatacgtttggtaattgctcctccgactaggataaaggatgctattgaagcggccaatcccatgcatattgtctgtacatcgggtcgcacaaattgcatagtatcataaatagccattccagatattacccatccaccaggagagtttataaacaaataaagatctttggtatccttttctatactgagatatatcataagactaataagttgattcgagatttcggtatcaacctcttggcctaaaaaaaataatctttctcgataaagtcggttgtatatgtcaacccaagatgtatctccttctccaggacttcgaaaaggtacttttggaacgccaataggcatgaaatgaaaaaaaaagagaataaagttctctatttc

SEQ ID NO: 609 - DNA, 641 bp, Arabidopsis thaliana
cttttttttttttttttttttttttttttttgtgacatagtttcaattacaatttcatttgccacatctctcaaactattacaacatattcaactatttcaataccccaaaaaaaaaaagcatttctctgcctatttcttcttatacatacgaattcaagtaccatgagaaaaaaaggaatgtacttataattagctatgcatcatcttcttaatcttcagtctttagtctttacttctcctccccaacccgcatttccattttttttctttattttttctcccttctaacaatattgagtaattaacatgtaaaaacctgtcgaaattagatccttaacgatctaaattatacgaaaactcgaaacttacccccagtaaaaaaaaaagtaagtaagcgtactgcttgtaattaagcttcaggttctggtcttgaactttctttgagctttcaagtcaatcacaatgatggagatgttgtctttacttcctttttgtagagcaagcattgagaggtagtcagctgcggcttggcaagctggatctattcctttgcctctctctgctagaggcggtgcaccgttcttcttgtgccacatcaatatccgtctccttgctatttcgcagacttcttggttgttc

SEQ ID NO: 610 - DNA, 641 bp, Arabidopsis thaliana
cagaatctttgaaagcagctatgtcctcggccctcgatgtaatgcaggctatgggatcgtccatttggtctttactctcaaaggtggaggagatgaacataatggtaacagaactcgctgttgtagtaacaaaagagagttctatgcaaggaaaatgcgaagatcttctggcctcaactgcgatcatgcagatagaagagtgtagtctcaggactcatctgatacaaactaggcgagaagaaggagaagacgcagagactccacctccattgttgccattaagcaagtttccatggccataaataacaaaagcttacagttcccacacgctcaacactgatcacctgtaaattgctctttgatgcccccacatttctcttgtcgagatccttttttgatctttgcttgttgaagttttcttcttcttttttttggtataaaaacattagcttaggaaaaaaggaagtggaagatcacgagttcgaaagtcttaggataccaaaaaggaaatttattttgttcacaaatcacatgtaagctctgatgtggggtttattctttagtatcatttagtgtagaaatcataacaaaatttaattttaggactgttttttggcttttctgttatatattttttgaca

SEQ ID NO: 611 - DNA, 641 bp, Arabidopsis thaliana
atctgtggtgatgatgttggactcgctgaaactggagatgtctttgtcgcgtgtaatgaatgtgccttccctgtgtgtcggccttgctatgagtacgagaggaaagatggaactcagtgttgccctcaatgcaagactagattcagacgacacagggggagtcctcgtgttgaaggagatgaagatgaggatgatgttgatgatatcgagaatgagttcaattacgcccagggagctaacaaggcgagacaccaacgccatggcgaagagttttcttcttcctctagacatgaatctcaaccaattcctcttctcacccatggccatacggtttctggagagattcgcacgcctgatacacaatctgtgcgaactacatcaggtcctttgggtccttctgacaggaatgctatttcatctccatatattgatccacggcaacctgtccctgtaagaatcgtggacccgtcaaaagacttgaactcttatgggcttggtaatgttgactggaaagaaagagttgaaggctggaagctgaagcaggagaaaaatatgttacagatgactggtaaataccatgaagggaaaggaggagaaattgaagggactggttccaatggcgaagaactccaaatggctga

SEQ ID NO: 612 - DNA, 641 bp, Arabidopsis thaliana
gcggccgcaaagagcaacaattccatctctggttcgacccaaccgccaatttccacacttactcaatcctctggaaccctcaaagaatcatattgaccgtcgatgacacacccattagagagtttaaaaactatgagtctctcggtgtcttgtttccaaagaacaagccgatgaggatgtacgcgagtttatggaacgcagacgattgggcaacaagaggcggtcttgttaaaactgattggtctaaagctccattcatggcttcttacagaaacattaagattgactcgaaaccaaactccaattggtacactcaagaaatggattcaacaagccaagctagactcaaatgggttcagaagaattacatgatctacaattattgtactgaccataggaggtttccacagggagctcctaaggaatgcacaacaagctcatagaatctcaaattatattctatttatttatctacacttcctctctttcttttatgtgaaaattgtgaatgctctgtttctagcttgtctattatgtccgagaatttctttttctgtttttgattcttttcgttgtatatctttgtccaataaaggaaatgatgtgtctttactctaaaaaaaaaaaaaaaaaaaaaaaaa

SEQ ID NO: 613 - DNA, 641 bp, Arabidopsis thaliana
tcttcttcttctcccatttctccattgacgacaacgaagaaacgtcccaacgagctcagagagccacaccaatcctcctttttcttcttcttcttcctcctgcatttttggttttggtggcgttgagacatcatcatgtctagcgcagaggatgtgaaagagcaaggaaacctcaccaacgaggcagagaagtcaatgccatcatcacagcaggaggaggctgttgtaaagaagaagtatggagggctcatgccaaagaaaccacctctcatttccaaggatcatgagcgagcatactttgactcagctgattgggctcttggaaagcaaggtgttgcgaagccaaagggacccctggaagcccttcgtcccaagttacagccaacgcagcagcagacacgttacaggaagtctccatgtgctccatctgagggtggtgaagatggaggagctgctcaggccgagggaggttcaggcaactgaggcgtagagagacagagagatgtatgaaaactcttgtgtaagaagtctgttataatcggatattttctgtccatttgaaacatcagatatggctttcattaaaatcttaacttgatcgagaaattatagtttacccttttggtccggaaaaaaaaaaa

SEQ ID NO: 614 - DNA, 641 bp, Arabidopsis thaliana
aacgagagttccgtaatcattttctcttgttgttcctgatcgcgtagctcaagcgaaaaaaatggcgtcgtttgatgaagcaccaccaggaaacgccaaggccggtgagaagatcttcaggaccaagtgtgctcagtgtcacaccgtcgaagcaggcgccggtcacaaacaaggacccaatctaaacggtctatttggaagacaatctggtacaactgctggttactcttactctgctgctaacaagaacaaagctgtggaatgggaagagaaggccttgtacgattacttgctcaaccccaagaagtacataccaggtaccaagatggtgttccctgggctaaagaagccgcaagaccgtgctgatctcatcgcctacttgaaggaatctactgcgcctaagtgaatctgatggtggattgattctgagttgttaagtctctctcagatgaggcttttttactttgctatattcttttgccaaataaaatctcaaactttttttgtttatcatcaattacgttcttggtgggaatttggctgtaatgtgtgctgaggctcactttatcgagtacatttgattttctgaggctcaaaaaaaaaaaaaaaaaaaaaaaaaaaaaaaaaaaaaaaaaaaaaaa

SEQ ID NO: 615 - DNA, 641 bp, Arabidopsis thaliana
gttcttctgttggtggtggtgatctactttcagagaatcgattttgccaagtgggttcttcttgacaatctttcttcttctttgaaatgggttcttctgtggagcagaacattcttgttactggtggtgctggctttatcgggacgcatactgttgttcaacttctcaaagatggttttaaggtttcgatcatcgataattttgataactctgttatcgaagctgttgatagagttagggagcttgttggtcctgatctctccaagaagctcgacttcaatctgggtgatctaagaaacaaaggggacattgagaaactattctccaagcagagatttgatgctgtgattcattttgcgggtcttaaagctgtgggtgagagtgttgaaaaccctcgccgctactttgacaataacttggttggaacaatcaatctatatgagaccatggcaaagtacaactgcaaaatgatggtgttttcatcttctgccactgtttatggacaacctgaaaagattccatgcatggaagactttgaattaaaggctatgaatccttatggtcgtactaagctctttcttgaagaaatagctagagatattcaaaaggcagaaccggaatggagaattattctgctgagg

SEQ ID NO: 616 - DNA, 641 bp, Arabidopsis thaliana
ccacgcgtccgctctgatcggaggaaactatgggctgctaaatactactaacttcacaccaaatccagactattacagtgctctgatctggcgacaacttatgggaagaaaggcattgttcacaaccttttccggaaccaaaaagatacgttcgtacacccattgtgcaagacaatcgaaagggatcacagttttactgatgaaccttgacaatactacaacggttgtagcgaaagtagagttaaataacagtttcagtctgagacatacaaagcacatgaagtcttataaaagagcaagttcccaactttttgggggtcctaatggagtaatccaaagagaagagtaccatttgacagcaaaggatggaaacctacacagtcagactatgctactcaacggaaatgctcttcaggttaattcgatgggtgatttacctcctatagagccgatacatataaattcaacagagccaataacaatagctccatattccattgtgtttgtgcatatgcggaatgttgttgtacctgcatgtgcttaaggtagctgcatatggaacttaagacagttccttcattcagttatttgattagagaaaaataaagaagcgtacctttcaaaaaaaaaaaaaaaaaaaa

SEQ ID NO: 617 - DNA, 640 bp, Arabidopsis thaliana
  misc_feature (1)...(640): n = A,T,C or G
agttctggtttggacagaagaagaggtgatagtagaaaaaaccgacccgctgttgaagaaatttggttagaggttattgagaagcttcgagttaacggtttgagagagtttctttataaagaaggaagaatcgtctctcttaatctcggatcagctcctactgtgcatctaatgttcagttctccgttaaccaaatccacggctgagaaattccgaagccatattatgcaagcgtttgaggcagttcttgagtcacctgtcacaatagagatcagatgcgagacaaaaaaagacccgagaaacaacgtgcatcatcatcatcatcacccaactgtgaaagacaaaagcctgccacaatctttagcactcattggccatgattacaacatcgatggaagtggaagaagtgagatagttgaagttactgaatctaatggacaaagacgacaacaacagaagcaacaggaagaggagaggacagagccagttggttcctctgcgttagcccgagctannnnnnaacattnggaagcaagccagagtcagaaccagagccaaagcattgtgagaggtaaggtctcgttggctcatgtgattcagcaagctgacggatgctcactccagaacggttggtctaaac

SEQ ID NO: 618 - DNA, 640 bp, Arabidopsis thaliana
  misc_feature (1)...(640): n = A,T,C or G
aacaaaaacacaatttgacactaaccggtcaactaaagatccagttgaagtacatacttgatgatattcaaacaaaaacgacacaaactaaaaaagtctctagtgccagnnatttcaaaaagacaataacaactagcactctaaaaaccaacaaagtgactacgaaaattcaaaaaagctaatattccaaaacaaacaaaaaaaaaccaccctcgaaaatcttatctcaccaagtcaaactgcagaattaaaagatatgtcaagggaagataatagccaaaagagtgcaaccattaaacaagtgaaaacagagattgagttatgctgagaccaaagtgtttctcccttcgcttagtcgggaagaatttgttcgttgtctgcatctccttctgtctcaatggtaggctttgaaggtccagatccaggagcttgcttcttcttgattccactcactatatcatcgatccttagaagcatacacgctgcttctatagccgtcttgaaagtttgcgccttcacattgtacgaatcccatatcttgctctctttcatatcagctattgcaccagtgttcccgtcaataccagtccatgcgttttcaccatttgcatgcttcccttgcaatgcagtcatagtacgg

SEQ ID NO: 619 - DNA, 640 bp, Arabidopsis thaliana
ggcgaagaagaagaagaagaagagaaaatgacgatttgcatgtgttgcgattcacatctcgtagcgaaatcgattctaaatccatggaattctcctaggataacgaagctaggtttcgtaccagtcgttcgccgttttccagctactactaccgtcaaggcttcggcggtggattcacctgagagttcttcaaatttcgccaagcgtatggatcaagcttggattatctcacagcaaccaagtcctgttggatgttcatcgtgcaattcaaagggtcatgtggaatgcaaatggtgtgcgggtacaggattcttcatccttggtgataacatgctttgccaggttccctcaaggaatacttcatgtgtaatctgctctggacagggttctgctagctgtagcgattgcaaaggaacggggtttcgtgccaagtggttggaaaaacctccagtgccaacataactgatgaacaaaagcaagttaagctttttggtctttgatgatttcttatggaggaaaaatgtttatatattgattcaagtggaacatgaatcagatatgcatatatctttatacatgtgttaagtatatatatgtaagttcatttattcatttccccttgttctgtctgtacaaaaaa

SEQ ID NO: 620 - DNA, 640 bp, Arabidopsis thaliana
  misc_feature (1)...(640): n = A,T,C or G
ctctctctctctctctcgagtctctcgacggtcgcatatcaaaagtccatttctttcttctctttggaggatcagcaactatggatgaagagtacgaagtcatagttctgggtactggtctcaaggagtgcatccttagtggtcttctctccgtcgatggtcttaaggtacttcacatggacaggaatgactactacggtggagagtcaacttctcttaatctcaatcagctgtggaagaagttcaggggagaagagaaggctcctgctcatttaggttctagcagagactacaatgttgacatgatgccaaagtttatgatggctaacggaaagcttgttcgtgtccttattcatacggatgtgaccaagtacttgtcttttaaagctgttgatggaagctatgttttcgtcaaaggaaaggttcaaaaggtgccagctactcctatggaggccctgaaatcttctctcatgggcatatttgagaaacgtcgagccggcaagtttttcagttttgttcaggaatacgatgagaaggacccaaaaacacacgatggaatggatttgaccagagttacaacaaagnaactgattgcgaaatatggtcttgatggcaacactattgactttattggtcacgc

SEQ ID NO: 621 - DNA, 640 bp, Arabidopsis thaliana
  misc_feature (1)...(640): n = A,T,C or G
ctcgagattgcccatcaactggtgacgatcgagaacggttcagagttccccttgcgatgcgctctcgtattggagacatagatggacaccgagatcgctatggagatcgtgatctggagagggagcgggagcgggagcgtgagtttgaccgctacatggatggacgccgtgaccancatgggggacgatatagctacagggaccgcttcgacagtggagacaagtatgagcctcgtgatcactatccatttgagagatacgcaccaccaggagaccgttttgtgagtgataggtatgggatgcctgaacatcatcttgagaatgaatatcgcgggagagagagaagctatgacagggacagatacgcaanngatacaagtgacagatatggagatatgggaccgatacgcgatgagggaagaccctacagaagcagaccaggtccttatgaccgtcctagccgtcctggaggcagaccttcatcatatgaacgttggtagtttgttttggttaaccagatgtcaatgcttatgctttgggatttaggtctatatcagagatagaactcgaactcgagatctctgttatgcttttttgtcgaatattatgattcttcatcgcagtaaaaaagttatgttct

SEQ ID NO: 622 - DNA, 639 bp, Arabidopsis thaliana
cttttttttttttttttatgtgtctggtttagttccctatgttgttgttgttgtttctgagaactgaacatctcttgtttccacgaattcacagagatgatccgataaaaaaatgcttctttacaattcactagtccgcggtagaatcacccgaaccatgacgctctcttctgatcatatctagtagatcttgaacaacttctgacatcagtggtctaaattctggttcagactgaacacaccgggatattatatcagcaaagtgtgacaatgactttgcagggtattgtccattaagagatggatcaaccattttgcccaatgcatcgatatcatgaagctgtgggattgcccacctcaccaagaactgctctcctctactccggtccctatcgtaggacattctacccgtcaatagttctaacataacaacaccaaaactatatacatcactctgccatgtatagattccagagtcgaactctggagctccatatccgtaagcggctagcaattgccctgataactgactcacagagcctgatgatattagtggggccaaaccacaatctgagacaagaacactcaggtcatcgtcgagtagaacattggctgatttgaagtttctgtgtatgatag

SEQ ID NO: 623 - DNA, 639 bp, Arabidopsis thaliana
  misc_feature (1)...(639): n = A,T,C or G
ttttcaggtcaatatatttttatttcatagaagttcgtatcagtcgatacatatcttaaagtaagacaaccaaaaaaaaaaaagacaacacactgattattgatccgacgtggactcatcatatcaccatgccaagatcatagatgtgttaaaattattctgcgtacttaacttagtgttaagtaaactagttaaaaacatgataagtcaaacccacaatgcaccagcccgcttaagcatgggaatcaaggatccgttaagatgtagactcatgacctcgttggctccaccgaccaactctccaccaatgaaaacgcccggaactgcggggctacacccgagccgcaacaacgcctgctcgatctccctccctctagatatctcatccagctcgtaaaccgctggatttgctccgaaatcgcagagcaaagtcttgatcgtgtgagacatacagcaagagctcttgctgtaaatcannnncggtctctccannnnnntcttcgttatcatatccattgctattttatatggtatatgatccaacagcttcttaagtcgtttcttaaataggtctatgaatctatatttatgatctcttagtatatagatcgattttttttttgtagagatttaaggaaa

SEQ ID NO: 624 - DNA, 639 bp, Arabidopsis thaliana
ttatcaaggaaactatattatagcaacttcttaaagaatgagttggtagaaattttcagattttctactacacacaattgtcacaaacaatcaatcatgcaaaagaatcatcactactaaaacacaaaataatcctatcttacccttgccgatcagcgtgctgtggtttgagagcagagtgagtcgggtgtcctcttctgccaagtctctttgttggctcggcatgcttcttttatgggccactcgatctggaagccgtctctgttctgcttttctaactgacaacagtgtgtgtgaaacgtctgaggatctacctgaagcttgaagtcaagggtaaacaacaactccatctccaatctgtttaactctctcgtagtcacacctcccactcttgcgtagtatgcattgttgaaatacctatcatcgaagactttagcagctaacatgacagttgtaatgataaggcggtggacattaaggggtttgagaagggctcgggtcttatggagaaagtgatcaatgtagatatgcgcaatgacgaagcaggagggactgcagcaagagtacttgaaaatgcgatccaagtagtgtgcaatactgatctcagggggagatctcccgtcaaacacggtaacagag

SEQ ID NO: 625 - DNA, 639 bp, Arabidopsis thaliana
  misc_feature (1)...(639): n = A,T,C or G
ccacgcgtccgcaaaatcttaattctcagcttctggttttgtcgaaaatggaaggcggttccgctagtggatcggcttcggctttgtcaaacgatgaaaatctcgtcgtttcttgtgaggattcttcttctcctatagggaatgagcttgagcttggtcttacgttgagccttggtcgcaaagggtatcgagattgtagggtttacgctgatgattcttcttcttcttcatcatcttcttctctgagcagagctagcgtaattgctgggatcaagaggacagctgattccatggctgcaactagtgggcaagttgtgggatggccaccaataaggacttacagaatgaacagtatggttaaccaagctaaggcttcagccactgaagatccgaacttggagataagtcaagccgtaaacaagaatagaagtgattcaacaaagatgagaaattccatgtttgttaaggtgactatggatggcattcctattggaaggaaaatcgatctgaatgctcataaatgctatgaatcattgtcaaacactctnnnnnnaatgtttctgaaacctaaattaggttcacgcacactagaacccgatggtcacatggaaacaccggtcaagatactaccagatgggt

SEQ ID NO: 626 - DNA, 639 bp, Arabidopsis thaliana
ttttttttttttctccaaaaggacttattcaaaagttttaaacaaatacaaaaaattggggatccaaaagtggttctcagttttcacacaagattttcgtctagacattggaacgatataacaatgaagataatcaagaagccatgtttttccagatttgcaagtagaccacaacatatacagaccggatatatatatatctatttcgttggccatgtcgcttgtgcagacataataattcccacaataactccaaacaacccgagagcactcccgaatatctcgatcacaagaatctttacaaaaagtgtggagttctgagcatcggacaatgcacaactgcttccaatgattcctacacataacccgcatacaaggttggcgaatccaactataattccagatgcaaagattgcatatccagctctaagagactcagcatcatacatctttgaagatgggacactctccaactttgtttgcagtatgattgcaacaataactccatatatagcaacagcttcgcaaaagatgacactgatgagattcttcgaagtaatacgaggagcttctatagccgcaccgatcaaactacttcccgtaatgtaaattccccaggcggcaccgaggactgagaca

SEQ ID NO: 627 - DNA, 639 bp, Arabidopsis thaliana
catcttttcaaataacacagcttaattaagaccaaattcccaattacattaagaattcaacactttctgaacaaatcctaagattgttctaatccaaaaaattcaaatttcaaagatttagatcttacttagcaaccattctagcaataaaatcctcataccggatcttaccatcagatccaacatcaacctctttgatccactcatcaaactcactcggctgcaatttctcaccgatactcgtaagtatatgtctcagatctgccacagcaacgaatccagtaccttccttgtcaagcactttgaacgcatcacgaagctggcgatcgaacggctctgttttcagatgtttcgccattagatctaggaatcgattgaaatcgaacggagacgagagattctccgtcgttatgattaatttgagttgtgattctgttggattgccgccgagtgaacgcattaagattccgagctccgacggtgcgattttgccgtcgccgtctgtgtcgaatagcatgaatgcttccttcattgatgagacttggtcgttgctcaaaccatccttgctcatcttcgattcggttcttacgggttttcgaattcgggtcggacctcttatggagaattccggacgcgtgg

SEQ ID NO: 628 - DNA, 639 bp, Arabidopsis thaliana
gatctcatcgagtgtgtaagtgagacgggtcatgagcttggtgttttggaaatccggcggtgcattcttgctgacgctatctgccttgacggtgaaggaagtgggctcgaagcagaacttcttgcctgtgtacttaccagctttgaacgagaatgtctcagagccaccatcgatagttggacactggtttgccgtaccggtaccctttacctccatgtaagtcttgctctgtatctcgtcgtacgttagcctctttggtgctccctccgcaccggcccccgagacaacgagagcagaggtggctagagcaaaaccggcgatcttggcggcgtcggagcattttccagcgaagtctttgaggtcagagtggagagagcacgtgagcctagcttgtgaagagtctaacccaaaggacttgcccacggtttggtttaatcggagatggacattacgagaaggagaagcggcaatcttcgccggttgaagaaaagttgcggcggcttggagagaagttgccatgatgacaagactcagatgtcaatatgtttgtttgagtgataatgcgaagttgagtagtaataatcagaggagagattttgtttcgctaagataaggtcacctgcccgggcggccgctcga

SEQ ID NO: 629 - DNA, 639 bp, Arabidopsis thaliana
  misc_feature (1)...(639): n = A,T,C or G
ttctcacgcaagcttcaacgagaaaagatcggaatctcgccgtcggtaaagcgccgccgtaagtaaaagacggaaaaccaggtgaaggaggagattgtatttatgtgtagcagcgtttagtgtgaggaaggaggagattttgtatatagttagaatttgcttcgaagacgatgtcgctgagaattaaattagtggtggataagtttgtggaggagcttaagcaagcacttgacgctgatatacaagatcggatcatgaaggagagagagatgcagagttatatagaagagcgtgagcgtgaagtcgctgagcgagaagctgcctggaaagctgagctctctcgccgtgagacggagatcgctagacaggaagcgaggttgaagatggagagagagaatctggagaaggagaagagtgttcttatggggactgcgtcgaatcaggataatcaagatggtgctctggaaattactgtgagtggtgagaaatatcggtgtcttagattctctaaggctaagaaatgaggttggaaattggaatctggattctaaatttagggcacaaaaggaaaagatttgtnnngcgtttatgatggatgcaatgggaattgttggaatgatgcttggtttgtgtaaatta

SEQ ID NO: 630 - DNA, 639 bp, Arabidopsis thaliana
  misc_feature (1)...(639): n = A,T,C or G
ccggtagagactaaaccggctgctccggtcgttgcagagacaaagaaggaagaaatattaccagctgctccggtcaccacagagaccaaggtggaagagaaagtcgttccagtagaaaccacaccggctgctccagtcaccacagagaccaaggaagaagagaaagccgctccggtcagcacagagaccaaggaggaagagaaagcagctccggtagagaccaagaaagaagagaaagcaaccgcctctactcaggtcaagagggcctcaaaatttattaaagatatatttgnctcagtcaccactagcgagaagaagaaggaagaagagaaaccagcagtagtaacaatcgagaaggctttcgcagctgatcaagaagaagaaacaaaaaccgttgaagcagtcgaagaatcaatcgtctccatcactcttccagagacagctgcatacgtagagccagaagaagtctcaatctggggaatcccacttctagaggacgaaagatccgacgtgatcctcctcaaattcctccgtgcacgtgacttcaaggtcaaagaagccttcacgatgctgaaaaacaccgtccaatggcgcaaagagaacaagatcgacgacctagtctcagaagatcttgaagga

SEQ ID NO: 631 - DNA, 639 bp, Arabidopsis thaliana
ttttttcttaagagattttattgtcttgcccttacaactacgaaacacattattataaagccaactagggaaaacagaggtacttcaagtaaggtttggtttataaaaccttataaatcccctactgctacttagaaacatgatacaaacaaacaaaaacacacttggaaacagaagcacttcaagatatatagtttggtttgtaccaaccttattgatcactcccttctacttcgaaacatggttggtcccagagacaagatcctgcaatgactctatgaaattatcgacataaccggtcacaagtccaggactagttagtgtctccctccacttggtgtgattcttcttcaccagattcccgatctcactgtcccttttcatcacactattgatagcatcgaacaagctctctttcgagaaccatcctgtttcctctcttgccacttcaaccgaaaccttgagttcgtcactcagcaatcttgtgttgaggacctgatcacccaactgtggtaccaagactatctgacaatcactcagcaaagactcccacattgatccaaacccacaatggctcacaaagcacccgactgatggatgagacaatagcaatggttgttgaacccattctccccaaac

SEQ ID NO: 632 - DNA, 638 bp, Arabidopsis thaliana
atagaaccaaattgcatttcatttgctgtttataaaaacagcccagtccaacatagaacgaatccgtgtacactccataatagttatatagaggagcagaaaaaatgactttcaaattaaaaacaaaaccacaaggaacaataagaaaaaagatgcttcctaaaaattgttttcgaaaaggaagaattaacaatatagattttttccgggaataatagcgaaaccagaaaaagaggttccactaggtaaatcaaaaagagttaagaacaaaatcgatacaacaccatctctctctcgtcattcatttaggtactaccttccgcgggattctcagtctccattggttcggcagaagctggttgctctggctcactcttgccctcatccgcctgctcacctcccttggcttgtggtgcctctgctttagccaccggctttggtttggtcattataggcctgcaaaacttgtccaatgcctctgccttgcttttaacgtcagctgacaagagagccggtgtggcatacttgggaagtgtgtcctgctgctgctgctttccccgcagccatgcttctgcttccacacactcgttcaaaaccttttgcttctctgccaattcaatgtgatcaaacttgggatc

SEQ ID NO: 633 - DNA, 638 bp, Arabidopsis thaliana
accaattcgacactttcacttcttcggaaagaactaagagaaggagatctacaaaggttgttaggatttacttctcgtaatggttctgttgcgtcaagtgtaactcctgatcctctcctgtcgtcatttatctcacctacacgatcacagagttctcctgcgccacgccaaaccaaaaacgtatccgaggataaacagatagagcgcaagagacaagtgttcatctcaccggtctcgttaaaagatcgggaagagaggaggcacaaatcagagtttgttcagaggctcttgtcatcagccattttcgatgaagtctaatgcacatacaaagattgagaacatggaggaactaattcgaatcagacttgagagaatctggtttcgagaaaaacaatggttgggatgagaagaagacggagaagagcgagatgcagctatgttatcaatatctatatctatctatgtattgtgtctgtttggtgctactaaatacattgcgtagaaatgtgttttcttaagtttattaagcaattgaaaagtaagatataggaagaagaataagtcctcttgtctgtagcataaaccctattggtgttcttgtgttgtgtgtcttatgaaatgaaaaatgttcactctaa

SEQ ID NO: 634 - DNA, 638 bp, Arabidopsis thaliana
ttttttttttttttttaaaaaaacaagaacacactacattatttctcttaatctcctaagaacaatatatttggccattcaaactctacaattacaatcagaaaacattacaattttttataacaaaagtattgtttgagctatttcccatagagattattcaccacaagccatataaaaagcttgattttggcaaaatccatcttcagaaagccgtagtttactatccaatagtcaaacacgttgaccaaagactaatcccaccaaaataaaaaaactcaacggcggcgatcaactctacctaaatccacaagcttcttcgatctatttgcacaaaacgacgccgctgctgatatatgaggcttttccggcaccgccgttacctccccagaattaccaaactccgatggaaatctcattttccgtttaaacggacagttaggactagctctcaccaacggactcaaacaaaaagccatccccgacatgctcttccctatccccatcgcaatcttcctccttcccggagttttcgtcgccggagttctcctcaattcctcgattgattccgccgactgctccggttccgtatctcttacaggtgacattcctctacagtatatacgttgaggtctacg

SEQ ID NO: 635 - DNA, 637 bp, Arabidopsis thaliana
cttcaatagcttccataacagtgtcatagtcccggttcctgaccaaaagttcatccattgcggttcacataaacaagaaaacaatacaaatctatcagtcgaaaccctaagcttgagacacatatcgagttgcacacagcaaacgatcttacattccgaaaagctagatttgtcaaatcaatgagattacaccaagagatattgatcgtgcttggtgcagcatcacttcttgtcttctgcttttctcggcttaacaccaggagcctcttggagaagttcttcatcagggataatcacaggccattgttctccagcttcacgaaacatttgctctgtctcaagatactgacctttatcaagaatcatctttctaatcgactgagccgaggttgcagctgcatcaaaagcttcctcaacaccattaacaaaagtgacagtgatctgcggcggctgctcatcggttctacgtttcaccaaaacctgacaattgggattcgattctttggccttccttgcattgcattgagctaagaattcaacacaagacgcaagtcttggatctaatgtgttgaactcaattcttacttttgatagaaacttcaacatcttctttagatatcaaacacttgaccggtcg

SEQ ID NO: 636 - DNA, 637 bp, Arabidopsis thaliana
  misc_feature (1)...(637): n = A,T,C or G
gcggccgcccgggcaggtatctctctcagcggtcgcggtggaaagaacccgggtttacttaaaatcaattctggaggaattcaanngnagnnacaaggtggtggaaaagctgtggaagttgatagatctgatattgtaagtattagttggacgaaagtgacaaagagtaatcaattgggagtcaaaaccaaagatggattgtactacaagttcgttggatttcgagatcaggatgttccaagtctgtctagctttttccaaagttcttatggaaaaacaccggatgagaagcaattatcagttagtggtcgtaattggggagaggtggatttacacgggaatacactaacctttttggttggatcaaaacaagcttttgaagtatctttagctgatgtttcacagactcagcttcaagggaaaaatgatgttactttggagtttcatgttgatgatactgctggtgctaatgagaaagactcgctgatggagattagttttcatattcctaattccaacactcagtttgttggtgatgaaaaccgtccaccttctcaagttttcaatgacacaatcgttgcaatggctgatgttagtcctggagttgaggatgcggtcgtcacatttgagagtattg

SEQ ID NO: 637 - DNA, 637 bp, Arabidopsis thaliana
gaaatatcatatcattcactaattaaacatacttaggcaaaagccaaatatacttagctttaaaacctaatttgatccccaaaaaacaccatcagggtctattttacaagttccgaatccaaacaagagaactgaactaagaagtctaagaacctcagaactcctgagaagcagatccaatatctcctttgttcttgccaaccttggatggcaaaagagtctgatgaatatttggcaaaactcctccattcgcaatcgtcacacttcccagaagtttgcttaactcttcatcgttcctcactgcaagctgaatgtgtcttggtactatacgtgtcttcttgttatcccttgctgcgtttcccgccagctccaacacctcggcggcgaggtactcgagaacagcggagagatagaccggagctccggcaccgacacgctcggcgtatttaccggatttgaggaatctagcgattcttccgacggggaattgaagaccggctttagatgatcgagagacggatttggtggcctttggctttcctctgccacctttggttgttccgcttcctgcgcctgtactcatcgtcttcttcgaaatttagaacagataaacgatttgatgagagtttgaagaaat

SEQ ID NO: 638 - DNA, 636 bp, Arabidopsis thaliana
  misc_feature (1)...(636): n = A,T,C or G
tttttttttttttttttttttttgagactaaagaagggacgttacttaatctctccccttttcctaaaaatccatataaaaaggaaaccaaatacaaaaaaaacgacgtttcatcctcaaaactcgtctctatggtttaacaaattaacaataacaaaagacatctagagctcatcgtgagactcatcttcctcctcagtcgatgattctcctcctgcaccacctggtgctccgccagatctctggtaaactgctgtgatgattgggttacacactgcctctacctccttgagcttctcgtcgtactcttctttctctgagttttggttttcgtcgagccactccaaagcctctttcgtcgctgcttcgatcttctccttttcatctccttccaatttgtcggcaagcttgtccttgtcgttcacttggttcttcatgttgtacacgtatgtctccagggcattcctggcgtcgatcttctcctttaccnnnttgtcttcctctgcaaactcctctgcctccttcaccatccggtcaatctctncttggctcagacgaccnnnntcgtttgtgatagtaatctnctctgatttaccactcgccttgtcctctgctttcacattaagaataccgttg

SEQ ID NO: 639 - DNA, 636 bp, Arabidopsis thaliana
tttttgaatcaaacaactctttataattcttagtgcaatcacagtcaaaataactcaaatagcttttggtcaaaatatcagatcaaagcacaatgcacttgagagagtctttacaagccaaaagtaaattttcatgaattgaatcaaaacatgatgaacacttagtaactcctgccccaataggtccatttctttgcaggttttcctgaagcaaagcagagagtgccttcagggagttcaggctgatcaaatggagaacaaagggttttagctgctcctgtttcacctttcgtacgtgccttaacatctctttccacttcctcttcatcacaccagggagccaaaatgagtttcttttcgttaagagctttgataaactcatcccaagtctttacctcttgaacacatgcttccctcttttgcttagcaacttcatacatgttttgctggatcttttcaagcagttccttaacatgttcgactaagctacctcttgggatatcttccttaactccgttgtcacgtctcacagttctgacctgatcattttctaggtctctgggaccaatctcaatcctcaatggaacacccttcatttcccagtctgaatacttccatccaggagagtagttgtcc

SEQ ID NO: 640 - DNA, 636 bp, Arabidopsis thaliana
cagcgcagtttataattcaaacagagagacattatactaatattatggaaatttattccgaacatttctgaaggcactgcgttacaaactcaccatggtttatttataggcatatagataatacataagcgtatatatatatatgcaatcatgcatggtagtgaagatattatatagttttaaacacccggcttagtctgaacaggttcgtttagcccgtggcctcctcctccgtggtgtcctcctccacctccgtatcctcctccaccacctccgtagtgtcctccacctccgtgtcctccaccacctcctccgtagtgtcctccacctcctccgtagtgtcctccacctcctccgtagtgtcctccacctcctccgtagtgtcctccacctcctccatagtgtcctccacctcctccgtatccgtcaagtccgtggccccctcctggtggttgatagtttgggtagggcggaggaggagccacctagacggaggggacgaaggccatggaatgagatggagttagggtttttgtgggagattgcagtggagaatgtggttggtgagagcaaagctgatgcgcttgtggccattttgcttcttcttcttcttctctaagaaaaatttcagtaata

SEQ ID NO: 641 - DNA, 636 bp, Arabidopsis thaliana
gaattcggaagtcttcaattggaatttggatcgtgggattttggaaatggcatcgaaacggattttgaaggaattgaaggatctgcagaaggatcctcctacttcatgtagcgcaggacccgttgcggaagacatgtttcattggcaggccactataatgggtccatcggatagcccttattctggaggagtttttcttgtaaccatccatttccctccagattacccatttaagcctcctaaggtggcttttaggacgaaggtgttccatccaaacattaacagcaatggaagcatctgcctcgacatcttgaaggagcagtggagtcctgctctcacaatttccaaggtgctgctatcgatctgttctttgttaacggatccaaacccagatgatcctttggtccctgagatagctcacatgtacaagacagacaagaacaagtacgagtccactgctcggacctggacccaaaagtatgccatgggctgacacaaatactgtccttaaggaagagccctaataattaaactcttcttatttctatgtaatgatcttttatagacttgtctgtcttataaaatttgtgaagacaggatcagtaagaaattatttgatctccattcaaaaaaaaa

SEQ ID NO: 642 - DNA, 636 bp, Arabidopsis thaliana
  misc_feature (1)...(636): n = A,T,C or G
gcggccgctagagtttgcggttaagcatctgttcgaagcagagttcaagctttgcaacgatgtctttgagagacttggtttgaatgtttggatggattgcttttcaaagattgctgctcaggccggtatgctcgcgttccttcagtttgggaaaactgtgactgatagcaagaaagatccaatcaagcttctgaagctgttagatatctttacgtcgttgaacaaactgagagcagatttcaaccgcctctttggtggagcagcctgtattgagatccaaaacttcacaagggatctcatcaaaaggataatcgatggtgcagcggaaatcttctgggagcttctggttcaggtagagattcagaaacaaaccccgcctcctagcgatggtggtgttcctagattagtcagttttgtaactgattactgcaataaacttattggagataagtacaagtcaacactaactcaggttctgctcatacataagagctggagatcagaaaggttccaagataatcagcttatggttgaggttttaagaataatcaaagccattgagcagaatctggatgtatgnatgnnngcgtatccggatcaaacgcttgcgcatttcttcggtatgaataatcactg

SEQ ID NO: 643 - DNA, 636 bp, Arabidopsis thaliana
ttttttttttttttttttcatggcgcgaaaatattatagaaaccatcacaaaaaacacaacacagtttaagaacattacacagacgctaaaccaaatcgataaaaatttaaacagttaaacgcctacgaaacatttgacatatattcaaatcgtataaaaggcgacacccgtatttaaacgctcctaatacttgtatccttcctcatacaagctctcagaggcggccgagtcaccagaagccccgccggtgtatttcccgagggtagcgtccgagttacccttgcacctggtcaggaaagtggcctgagctttggctacattctctgtcttacctgcccaagccttgagagtgctttgttggagggctcggccaaatgagaaagtgagagtccatggcttcaacacatcgagcttgttcattgcgttcagatttagtgttgcttcctcttcactctgtccgcctgagaggaacacgattcctggaactgcaggtgggactgtgcggcgcagagcagtcactgtgtattccgctatcacttccggtgcaacctttgggctgtcagagccgggagtgaccatgttcggtttaagcagagtgccttcgaggaggacatggtggtcgttcaaggccttgt

SEQ ID NO: 644 - DNA, 636 bp, Arabidopsis thaliana
ccacgcgtccgctaaaccgtctcgtgatacctaaacaacacgccgagaaacactttccgttaccgtcaccgtcaccggcagtgactaaaggagttttgatcaacttcgaagacgttaacggtaaagtgtggaggttccgttactcatactggaacagtagtcaaagttacgtgttgaccaagggatggagtcgattcgtcaaggagaagaatcttcgagccggtgatgttgttactttcgagagatcgaccggactagagcggcagttatatattgattggaaagttcggtctggtccgagagaaaacccggttcaggtggtggttcggcttttcggagttgatatctttaatgtgaccaccgtgaagccaaacgacgtcgtggccgtttgcggtggaaagagatctcgagatgttgatgatatgtttgcgttacggtgttccaagaagcaggcgataatcaatgctttgtgacatatttccttttccgattttatgctttcgttttttaattttttttttttgtcaagttgtgtaggttgtgattcatgctaggttgtatttaggaaaagagataagaccaaaaaataaattggaacaatggttttgtggaaaaaaaaaaaaaaaaaaaaaaaaa

SEQ ID NO: 645 - DNA, 636 bp, Arabidopsis thaliana
ttttttttctaaagaaagcatttttaccaattgaagctcacaaaacaaaatgatctcatatctgcatcaacaactgtttttcaatattacagagcaaaagtgaaacaattgagcaaaataaaagagatattgaccttagacaagctcaatgtaagccattggagcattatcacctctccttggaagagttctgatgatcctcgtgtatccaccgtttctctcaccgtatctatcaggaacctcagcaaacagagcgtgaacaatctgtttctcgtagatatatcccaaggcttgtcttcgcttgtgcaacgaaccgtctttagccaatgtaatcatcttgtcaacgaacttcctcatcgcactagctctagctcgagtcgtcttgattctcccatgcttaagaagctgagtcgtgagtcctcgcagaagagctttgcgctggtccggtggtctgttcagcttcggaacacgtcgtccgtgtctcatcgcgtagatacgaccaccaccgtcaacaattttgaatccattctcaaagctttgccaatctggaagtccgattgagaggagaggattgaccggagagagaccggagaaagatgggagtgaaggagaagagattgggagacgaagagtaac

SEQ ID NO: 646 - DNA, 636 bp, Arabidopsis thaliana
tcttagaattcagggaagccttccgcgtattcgacaagaatggtgatggttacattaccgtgaatgagctccgtactactatgcgctcccttggtgaaacccaaacaaaagctgagctccaggacatgatcaacgaagcggatgcagatggtgacggaaccatcagtttctctgagtttgtgtgtgtaatgactggtaaaatgattgacactcagtctaagaaagaaacgtacagagttgtgaatcaaggtcagggtcaagtgcagcgtcacactagaaatgacagagctggtggcaccaattgggagagggacatagcggtcggggttgccagcaatatcatcgcttcgccaatttccgacttcatgaaagataggtttaaagatttgttcgaagcgctgttatcttgaaatgacacgtcagtaactttatgccaatagggtctgacaattatgttagatctctctcaaaaggcgtttcatctaatgacaataatttctatgtaataaatttattgcatgtgttagtgtgttaccatcttcagttgtgtgcaatttattaaaatgagtttgtaatatggtttcagtatcgaatataattggggtattaatgtaaaaaaaaaaaaaaaaaaaaaaa

SEQ ID NO: 647 - DNA, 636 bp, Arabidopsis thaliana
tttttttttttttttgtaaaccaactcttttttattcatgaaataataaaagtacggaattttctctgttttctgtctgaattaaagatgctttgagccacactaagctcaaaggtttttagccacacaccagaagatacacacaactaccaaacccaggtctaaggttggacctccttattacatcaatctcttctttggaaacgtagcagctttagccctggagaccaatgatgccgcaagcaacacggccgcctgcgtttccagtagccaggctgagttcatggcctccctttccgaggtcatcagggtctgcatggacaacaacagccctaccaacaatagagtttggtccagtaagaggaatctggcaatcagtgattgtgaaggtggcagttccatcatctccaacagtgatgtttcctagatcaccagcatgtcgattagcatcctcaggggcaccgtgtgttttaccatcggggttgaaatgtggaccagtagacatgcaaccgttagtggtgtcaccaagagcatggacatggaaaccatgaagaccaggcttaaggccagaaactgttccactcacagtggtcacaccatcgccttcctgggtgaaaaagatagtccccgtaacac

SEQ ID NO: 648 - DNA, 636 bp, Arabidopsis thaliana
tttttttttttttttttttaacttaaacttcaagtactctgaaatttcatataacgttgttgcctgcgaacatagtacagacaaacccatataacaagaacaccacaatagaaaaagacaagaaattaaaaactctaaaaacaaacattcgaacatcttatttaatattaatctcatccattatataataaggattcgaaacttccggtagtagcatcatctcaccgttgctagctcatcacctcacggttttgcagttggtgctggtgctgattttgtaaggaatattgactccacatgccttaggaattccagctgcacggccagcgttgagaccagagcctaaggctctagcggcaccttgaatgcaattgcaagcttgctgacggtctggggtcgtcttggctatgctgttgaggtttttaacgccggagcaacacgctgggggaatgacaccaccttggagcacgtagccaatgcacgctgccaagttgctgttaactgagccacagcttagcgcagcgttcgatgtgattggaccggccacaatcatgcaggccaagagcaagcatgccaacttcatcactccagccatattgatctcttaggtagtgttttatgttcgtttgcaatagg

SEQ ID NO: 649 - DNA, 635 bp, Arabidopsis thaliana
  misc_feature (1)...(635): n = A,T,C or G
aagtgttcgttcacggcattgcttgtcctccagtatgagtatctccggtgctgcagttggttcaggcagaaatttaagaagagcggtagagtttgggaaaactcatgtggttaggcctaaagggaaacatcaagcaactattgtctggttacatgggcttggggacaatggctcgagctggtcccagcttttggagacccttccccttccaaatatcaaatggatttgcccgactgctccttctcaaccaataagtttatttggtggttttccctccacagcttggtttgatgttgtggacatcaatgaagatggacctgatgatatggaaggattggatgtggctgctgcacatgttgcaaatctgttgtcgaatgagcctgctgacattaaattaggtgttggaggattcagcatgggtgcggcgacatctctatattctgcaacttgttttgctctcggtaaatatggaaatggcaatccataccctatcaatttaagnnnaatcataggcttaagnnnctggcntccttgtgcaaagacattgncngncaaactagaagaggaacagatcaagaaccgagctgcatcgttgcccattgttgtctgtcatggaaaagctgatgatgtggtac

SEQ ID NO: 650 - DNA, 635 bp, Arabidopsis thaliana
gcggccgcatttgaaacgccgattcgtttttgctctttaagctttcttcttgatttcgacggtgtctctcaatctccgtcaagcttgacgaatttcaggagctatatataccatggcgctcttgtctcaagcaggaggatcatacactgttgttccttctggagtttgttcaaaggctggaactaaagctgttgtttcgggtggcgtgaggaatttggatgttttgaggatgaaagaagcttttggtagctcctactctaggagtctatctaccaaatcaatgcttctccattctgttaagaggagtaagagagggcatcaattgattgttgcggcaagtcctccaacggaagaggctgtagttgcaactgagccgttgacgagagaggatctcattgcctatcttgcctctggatgcaaaacaaaggacaaatatagaataggtacagaacatgagaaatttggttttgaggtcaatactttgcgccctatgaagtatgatcaaatagccgagcttcttaatggtatcgctgaaagatttgaatgggaaaaagtaatggaaggtgacaagatcattggtctgaagcagggaaagcaaagcatttcacttgaacctgggggtcagttcgagctta

SEQ ID NO: 651 - DNA, 635 bp, Arabidopsis thaliana
ttatggggtatagaagaagctacgcaatcacatttgtagcccttgtggcggctctatggagcgtaacaaaagcacagccgagcagttcatgcgtgagcacactgaccactctctctccgtgcctcagctacatcaccggaaactcaaccactccctcacagccttgctgttctcggctcgactctgtcatcaaatcttcgccgcagtgcatctgctcagccgtcaacagtccgatcccaaacatcggccttaacattaaccgcacacaggccttgcagctccccaatgcctgcaacattcagacgcctcccctcacacaatgcaacgcggccactggtccaacagcacagcctcccgcaccctcaccgacggaaaagaccccagatgtgacactaaccccaacctcattgccgggtgctcgttcaggagttggaggtggttccaagacagttccctccgttggtaccggctcgtccagcaggaatgttgaccccttgccgctgcattttcttatgtttgctgtattggtggtctgcacttcttcttttctttaaccaattctgagagttcatgtatttggtaatttcatttcacttgctgtgccagattgatcataagcgagacatgttttttgt

SEQ ID NO: 652 - DNA, 635 bp, Arabidopsis thaliana
ctcgagcggccgcccgggcaggtctttttgcctcagagctccgtggagagcagcaatcagtagccatggctgagcagactgagaaagcttttcttaagcaacccaaggtcttccttagctcgaagatatctgggaaaggaaagagacctggtaaaggtggaaaccgtttctggaagaacattggtttgggtttcaagactcctcgtgaagccattgatggagcttacattgacagtaaatgtccattcactggaaccgtttctatcagaggacgtatcttagctggtacttgccacagtgccaagatgcagagaaccatcattgttcgtaggaattaccttcactttgtgaagaagtatcaacgatatgagaagagacattccaacatccctgcccatgtctcaccgtgtttccgtgtcaaggaaggtgaccatgtcatcattggccaatgcaggccgttgtcgaagacggttaggttcaatgtgctgaaggtgattccagcgggtgcatctgcctttggtaaaaaggccttcactggagtgtaagagttttgaaagtcatgggagattttggtttgattttgatttcggaatgttttaatgttttgtttaaagatcccttttgttgggcggccg

SEQ ID NO: 653 - DNA, 635 bp, Arabidopsis thaliana
  misc_feature (1)...(635): n = A,T,C or G
cggccgcaatagagagataacatggctacgaaaagatagagaagtaggttttaaaacacacacgattaaagactcccaagagttttgagcccattctcacaagacgagattatagagaaacccacacaaatccaaagtttttagaaacattcttcttagtattcctctccttcatcatcttcatcgtcaccaccttcagcaccgacctcttcataatccttctccaatgctgcaagatcctcacgtgcctctgagaattctccttcttccataccctcacccacataccagtgaacgaaagcacgtttggcgtacataagatcaaacttgtgatcaatacgggagaacacctcagcaacactggtcgagtttgagatcatgcaaacagctctctggactttagcaagatcacctcctggaacaactgttggtggctggtagttgataccacacttgaatccagtaggacaccagtcaacaaactgaatagtgcgcttggtcttgatggtgccaacagctgcgtttacatcctnnnggacaacatcaccacggtacatcaaacagcaagccatgtactttccgtgacgtgggtcacacttagccatcatggaagctggctcaaaagcactgtttgt

SEQ ID NO: 654 - DNA, 635 bp, Arabidopsis thaliana
ctggacccggtcgtgggaccagaatcggcaacggaagcagccactccaagagtgctgactataatctcccatgtgatggagaagctcgtggcacgaaacgagtggttagctaagcaaactaagggatttgggaagagcttggaggcgtttcacggcgtgagagcgccgagcataagtatagctaaataccttgagaggatatataagtacacaaaatgtagcccggcatgtttcgttgttgggtatgtgtacatagaccggttggctcataagcatcctggttctttggttgtctccttgaatgttcatagactcctcgtcacttgtgtcatgattgctgccaagatactagatgacgtgcactacaacaacgagttctatgctcgggttggaggcgtaagcaatgcagacttgaacaaaatggagttggagcttctctttcttcttgactttagagttactgtgagttttagagttttcgagagctattgctttcacctcgaaaaagagatgcaactaaacgacgtcgtttcttccctcaaagatattcaaccaatgcaagaaagtctctctccagcatctactttatcatctttatatgtttgatatatgtatatgaatttttttaatataac

SEQ ID NO: 655 - DNA, 635 bp, Arabidopsis thaliana
actaaaagtagaagaaaaatggcgactcttaaggtttctgattctgttcctgctccttctgatgatgctgagcaattgagaaccgcttttgaaggatggggtacgaacgaggacttgatcatatcaatcttggctcacagaagtgctgaacagaggaaagtcatcaggcaagcataccacgaaacctacggcgaagaccttctcaagactcttgacaaggagctctctaacgatttcgagagagctatcttgttgtggactcttgaacccggtgagcgtgatgctttattggctaatgaagctacaaaaagatggacttcaagcaaccaagttcttatggaagttgcttgcacaaggacatcaacgcagctgcttcacgctaggcaagcttaccatgctcgctacaagaagtctcttgaagaggacgttgctcaccacactaccggtgacttcagaaagcttttggtttctcttgttacctcatacaggtacgaaggagatgaagtgaacatgacattggctaagcaagaagctaagctggtccatgagaaaatcaaggacaagcactacaatgatgaggatgttattagaatcttgtccacaagaagcaaagctcagatcaatgctacttttaa

SEQ ID NO: 656 - DNA, 635 bp, Arabidopsis thaliana
tattaaaacaactacccaaacaaaactttagatctgaaaatctcagctttgaaatggaggaaatcggaatagttatcgtcggcggcggaatcgctggtctcgccacttccattgctcttcataggaaaggaataaagagtgtggtgttggagagagcagagaaagtgagatcggaaggagctggaatcggaactctctccaatggttggagagcccttgatcagcttggcgttggtgatcgccttcgtctcaattcttctcttattcacaaggcacggaccatgttgattgagaatggaaaaaaacgagaattcgtttcaaatatagtagacgaagctcgttgtattaaaaggaacgatcttgttgaggccttatccgatgcccttccggaaggaaccatccggttcggttctcatattgtttctattgagcaggacaaaactacgttgtttccggttgttcacttagccaatggaaatagcatcaaagccaaggtcctgattggatgcgatggtgccaattctatcgtcagtgattatttgcagttaaacccgaaaaaggcgtttgcttgtcgtgcggtgagagggtttactaagtacccaaacggccatggatttccacaagaggttctaagg

SEQ ID NO: 657 - DNA, 635 bp, Arabidopsis thaliana
aaccaaccagatattacatgttacaacaactctcgattccaaagagaggccatttcactttgttcagccaccatttttaagcattcagtgccgttttttctatgtgacatagtgcatggttttacgtctgtggcgactatagtcagatacaaacctaaacgacaatccacatccatcgaccttgcatatgtatggtcgctctcccgtgtgcagacgcaaatgttctgtcctcgcccattgccatttgaaagtcattgaacatcctttccaagagcactcgaaaggtctttcatccttatgcacacgttgatgaagcaccagatatttgtgagccctgaatttctttccacacccttcgtgagtgcaacggtttctcttgtgagtttgtaatttcgctttactctcaaaagtcatcttgcatccctctaggtaacaacggttggggtgagttgtcgtggggacttcttgctgacgactccctgagcaagcctttggtgttttcttcagccttttcgcaatgggtttcttctcttcatcactcgtttcagtgtgctttaatgaagtttcacatgttgctttcctcttgccccttgacctcaacccttcacaaggactccttatgaaaccaatgctac

SEQ ID NO: 658 - DNA, 634 bp, Arabidopsis thaliana
ccggtcattgaccggtccgttaaacttcgcattagaatcaattgttacaagaagccaccacagagttgggattaagcagtaaaaaataacagaaacagccatcaccgacttcaaggtctctccatcaatacatgatcagaccaaagctttggctaattttcattagtcttgagacagagaatttagcagcagctcattgaaagggcgaattagaagacgagagattaaaagcatgagaagatgttggagtcttcacaggagcccaaatatcagcaccattggtttgagcaacttctgatgtatactccaatggaacaagacatagccctttacttcttaagctgtactcttccacttcctcctctgtagtagaaggggttgcttgcagataaggagcacttagaaccttgacttgttcttgaagaaactgaatgtattgcattccctctagaagaactgatgcagtgtcggtctttccgtaaggggaaactagttgttgaagagctgaaatacgttctgctaatttgtctttcctctccttggaagagaaagagagatcagatgacttgtgtcgtttaattttgttatcttcaagcgagtagacattgcgcttagtctccatcatcagcggccg

SEQ ID NO: 659 - DNA, 634 bp, Arabidopsis thaliana
  misc_feature (1)...(634): n = A,T,C or G
tttttttttttttcgggaagtagtaattattttttatttttttcaccgtggacggtactaaagtacaaagtggtaaaaaccccttgtaaagaaaaaaacaagagaggtcaaaacaaactacaaaaatgtaagnaaaaaaaaaagcgaatatatggttactgttatatattttnnntttttttaccttgaaaattagaaaaagaaattaaaaaaaaaactccaaaattttttatttagggcttttccttaaagagtgaagctaatccggtgacagccttcacttctctctccaccgccacgtcatcatcgccgtcggttggagaggaggaagaattaacaatcactctcggagataaacatttctcctcaaaaaccagctcaatctctacactatccacctccttctccaccgccgcatccgccgccgtaacatccgtcaccgtcaccgtctcatcgacaacaacaacggaagctcgcgtataagaagagagccatttagatcgcatgtactcagctttcctccacggaggaaaaggcattcctttcttcttcaaactctgtttcgccgnctccgatatcaaaaacacgatctgacttaaccgatcagattttccgacgaaaatgaacggtagag

SEQ ID NO: 660 - DNA, 634 bp, Arabidopsis thaliana
  misc_feature (1)...(634): n = A,T,C or G
ccacgcgtccgaccacaccatgagattagttgtcagatagatattcgcgagacgagaagctccaattaaaaaccctagagctcatctctctctccaggtacggccttttcgtttttggctttcaccggcgtggatctccggtgacggggagattcggaatttcggagagattttagatcatgtatagggagagaggtatggttggatcgaagtcggaggtggtcgatcggaaacgaataaacgagattcacgataacaggccttcgcattcgatgtctcagcctgtcaatggaaaaggcaaggtaacatcgacctccgttttgatggggaagcagcaattgcatgataaggaatcttcacgttctggttctatctctaagactaacatttccgacgctgtggatatatcagacacagacagcgaagaatcagaggtcagtggttctgatggagaggacacctcgtggatatcttggttctgcaaccttcgtgggaacgagttcttctgtgaagttgatgatgattacatccaggatgacnntnacttgtgtggactcagccatcaagttccttactacgactatgcccttgatttgattttggatgtggagtcttcgcatggtgagatgtttac

SEQ ID NO: 661 - DNA, 634 bp, Arabidopsis thaliana
  misc_feature (1)...(634): n = A,T,C or G
ccacgcgtccggtcactctaaactcatctctctcgccgaattctccccaacaatttccgccggaaacaaattctcagattccggtaactctaaaactatgtcatcggatattccgtgctgcggaaccacgttctcgctctacgtcgtgataatcatagctcttgtagcgttcgctggcttgatggctggtttaactcttggtctcatgtctctcggtttagtcgacctcgaagttctcatcaaatctggccttcctcaagatcgaatcaacgccggtaagatatttccagtagtgaagaatcagcatctgttgctatgtacacttttgatcggaaactctatggctatggaggctctaccaatatttttggataaaattgtgcctccttggttagctattcttctttcagtgactcttatactggtgtttggagagataatgccacaagcagtttgtactcgatacgggcttaaggttggagcgataatggctcctttnnnncgtgttcttcttgtattattcttcccaatttcatatccaatcagtaaggttcttgattggatgttaggtaagggacatggtgttctattacgaagagcagagctaaagacatttgtgaacttccatggaaat

SEQ ID NO: 662 - DNA, 634 bp, Arabidopsis thaliana
ccacgcgtccgctcgtcgtcgtctctagtctgaactttttcaatctctctcgatttcattcaatcaatggcgcctaagaaaatcggagccggcaaaggcgattcgagcatcttggcgaagatttcaaactacgatatcgtttctcagggaagacgcgccgcttgcgatgccgtctacgtgtcgaagaagctgttaaagagcaccgggaaggcggcgtggatcgccggtacgacgtttctcatccttgccgtgcctttgatcttagagttggagcaagatcatcgattaggcgagatagattttgagcaggcgagtcttctcggaaccccaccggtcggtgcgatgctctaaagtaactttagaaaccctaatccgtcgatcatatcataaatttgatattatcatgcttgtttctgctactcgattagaagctgttagtttccttccttgtgtaagattaggtttactcataagggatttgatgaatttcaattggctattttgaagattgtgtttgagcaatcttcttctaatttatttggcaatttatgatgtgggctgagattttctccgtacaagtgattattcttttaatctcatagctgtgactcactttgagtggagcatcaatctt

SEQ ID NO: 663 - DNA, 634 bp, Arabidopsis thaliana
  misc_feature (1)...(634): n = A,T,C or G
acataaaattgaacacatcctcttcctctgctctctgcaaacaaaaaaacaccgattcggtcaggaatcattcgtcgtgaaatctgtaatggggattgttgtcaagtctttcaaggatcaattctcctctgatgagagattgaaggagtcgaacaacatcattgcgaaatatccagatagaatacctgtgatcattgagaaatattcaaacgcagatctgccagacatggagaagaacaaatacttggtcccacgagacatgactgttggacatttcatccatatgctaagcaaaaggatgcagttagatccatccaaagctctctttgttttcgtacacaacactcttcctcaaaccgctagtcgcatggactctctctacaatactttcaaggaagaagacgggttcttgtacatgtgctacagcaccgagaaaactttcggctaacaaaagatttgtcgcttcatatcgaaatcgaagcgcactctgaataatccatttgtttgattcttatgtttgtgaataacgtcagctcttgttgttactgttattgttgttgttagctgacattgtacngaaaagctaaaaaaagaaagacatttgactttgtaaattatgtataatccaactatg

SEQ ID NO: 664 - DNA, 634 bp, Arabidopsis thaliana
ttttttttttttaaagcaattccatcacatttttaattaaccaagaccgcctggtttggtttggtttgctttatcaaaagatgaaatccatattacaaatgtcaccaaaccggattcataaactaaagtagcctaattcctgataacaaattctccagatgagatcaaaaggatttgtatttgatcaagaacaacaacaattctctcctatttgggaaacctctaaagatacatatattcaccagagcacccttctcaacttcatttcagttggcactcttcagacgcgcaatgagctcatcctttcttccttttgttggaaggcccttctccttgagcatggcgcggagcttctcaacggtcaaagactgaaagtctctttcgcctgtgcgactgcttgatccttcttgtctagatgcattagcagctcttttagctgagcttctgtcgtccagagctctatttgcagccctctttttaggaccatcttcagcagttccttttgagtctttagaactagattcgcctttttgcttctttaacaagagagatctgattagtatattttgctggtttgttttgataagctgtccttctgggggagatgtgtcatgctcacaaatgtagacccgca

SEQ ID NO: 665 - DNA, 634 bp, Arabidopsis thaliana
ccacgcgtccgaaagacaacaacgaagaaggagaatcaacaatagattcattcgctgcagagattcagattctcggtaacatcagacacagaaacatagtgaagctattaggttactgttcgaacaaatcagtgaagctgcttctatacaattacttccctaacgggaatctacaacagttgttgcaaggaaatcgaaacttggattgggaaacacgttacaagattgcgattggagctgctcagggtttggcttatcttcatcatgattgtgttccggcgattttgcatagagatgtcaagtgtaataatattcttctggattcgaaatatgaagcgattcttgctgattttggacttgcgaagctgatgatgaattcgccgaattatcataacgccatgtctcgtgttgctggttcttatggatacatcgcaccagaatacggatacacgatgaatataacagagaagagtgacgtgtacagctacggcgtcgttttattagagattctaagtggccggagcgccgtggagccacaaatcggcgacgggcttcacatagtggaatgggtgaagaagaagatgggaacctttgaaccagctttatcagtacttgacgtgaagcttcagggatt

SEQ ID NO: 666 - DNA, 634 bp, Arabidopsis thaliana
ccacgcgtccgaaaaactatattcacaggctgccgtgtaccttctccatccaaagatggcaactatagctactggtcttaacattgcaacccagcgtgtcttcgtcaccagcgagaatcggccagtttgtctcgccggtccggtccatttgaacaattcgtggaatcttgggtcaagaacaactaaccggatgatgaaacttcagccgattaaagcagcaccggaaggagggatatcggacgtagtggagaaaagcattaaggaagctcaggagacttgtgcgggcgatcctgtgagtggagagtgtgtagctgcgtgggacgaggttgaagaacttagcgcagcagctagccatgctagagacaagaagaaggctgatggttcggaccctttggaggaatactgcaaagacaatcctgagaccaacgagtgccgtacttacgacaactgaagcgatcaagatcctgttccggattcatacgtatacgacaaatctttgttccggtccatttggtaatgtcaggttatataaatcatgtctttgaatctgaattagctctaaaaacatttgtaatttgtagttccataaacgaatacaaaagccaaaatttcataaaaaaaaaaaaaaaaaaaa

SEQ ID NO: 667 - DNA, 634 bp, Arabidopsis thaliana
  misc_feature (1)...(634): n = A,T,C or G
tttttttttttttatcatcagtttcttcattaatcccactttattttctttaaatcccatctctctacaatcctaattgccaaaccctctctctccctcacacacgcacatatgcaaatacacnnngacatggaggtttgctcaacagtcacaacgaagaagctctcaagcctggccaagctaattctcttcaccatacagaaggtttcagacgcctcacgtcacaaactcctcacaaccctcgatccacatctactcgggaaacgtggcaagatcctacgcaaatccttaaacgaagccgtttcaacctcccactcacgcatcacgtgccgtccttccgaccaccaagatgtgcgatcatccttcatctcccctgtcccgctccagctagagtacgagttcagctgcagcagcaccccaccgagacgttcctacgccaccaccgtaagcaaaggacgacgtagtaacggatctcataacagaccgctcatcaacaagcgccaacgccaagcgtatatccgttacaacacacttcccaaggttcgtgactccatctgggaccgacacgtagcggcggcagtatttcccgacgtagctagcagcaccggtacgatggaaagctgccacgtggaca

SEQ ID NO: 668 - DNA, 633 bp, Arabidopsis thaliana
agagttctcactatttgtcaatccaaaagtgcagataacctagacgagatggaagaaactgatgacgaaaaggatgataggtcctatggttccttaatgatagagagattaactggaactcgagacggtcggatagatcacatgctccaggagaaaacctttgagcatccgtatctacaagcaataggagctcatacgaactattggagagatcaagatactgctcttttcataattaaacacttgtatcgcgagttaccagacggaccaaactcgcccacggaatccaccgaaggagatgatagtccaaaagactcaagtagacctcatagctggatagacagaagagaggctgattatgatgatgaagagcttcctttaacattctccgacaaacaaatcgctagaagcttctctgcagaagccaagaaatatttgaagaagccttaagactttgaccataggtttatatcgtatatccggtgaaagctccctgattttgtttttgtttcctgtgcagaagtaacatctagtgtagaaaatgtgaaaagtaaaaactccgacatggttttgccacattgtaaccataattttacatataataaagcaaaacaatgaaagcttaaaaaaaaa

SEQ ID NO: 669 - DNA, 633 bp, Arabidopsis thaliana
  misc_feature (1)...(633): n = A,T,C or G
gcagtgcaagaacaaagagcggcctcaacaacggggatgagctcaatggttgcagactcatcacctccgtatgtgaatctcaagaaagagaagagaagcccagaagaaaagttagaggcatcattaggacctcttcaggtccaacatattgatcttgaagagagaatagaaacaaaaggaggtgctccaagtgtcgaacaccagttcatgcccaccttcagcggtcaatgttccgcttctgcttggcctgagactgctagagaggatcttgttgccggctttacaaatggtagctgcgatggggatttatgtgttggactacgtttaggagacgatggagctaaacgcagacgcactcaggtgaccaacgaaagaatgagacccgccgaatagataaaaatgctaaagaacttgaaagtttgtcttgctctttgccaacacttccattgagagctttggtttggatttgtctcatggcaatcgaacttgaacatagccaaatttagcctcagttggatgcggttaccattctcgtttattctnnntgtccaatcccatatctcagcatcattgtatcattgatgtccaaaaatgtacaagttatcaaagttgagataaaaattgttatgtaag

SEQ ID NO: 670 - DNA, 633 bp, Arabidopsis thaliana
gcggccgaggtacctctggctcgacgattgggacgagtccattctcctggcagatgatggcatagcgggctagccccttggcgttctcttggatagagagctcgcttggctcggtggccccaatcttgaggactgcacgccattttgcaaaccgagctcctgccttgtaatactcctggcaacgtgcaccaagtgaatctagaccctgagtagtggtctcgccattggttcctgctagatcaaccacacccttgtccactttgattccagggataactccgttttccatgaggagctcaacaaagggtttgccatccgtggttttctggtagagggtttcctcgaagaggataacaccggagaggcaagggaaagtgccaggggacgtgaagaggagctcacggagagcttggcggttggactcaatgttctcaacattgatgctggcgaatcgtttcccaatagttcccgtgctctcgtctgctgccaaaatgccctttcccggtgtggcaatgtacttagccgtctttatcagctcatctgcgtatttgccgacaaaagcagacatggttgctttttggagtgcaagagagacgagttttgctgaagaggacgagacctgcccgggcggcc

SEQ ID NO: 671 - DNA, 633 bp, Arabidopsis thaliana
  misc_feature (1)...(633): n = A,T,C or G
ttctacatgaacttacaaaatctcccggcttccccaatctggtctctgcacaacaccaccaaaagagtctgcctcannccaaactgagacttgatacatagctttggtttnnnnggcattccttttaagaacaatggacttctcgacgaggcgatattatttgggatattgagtttagaggaagttgagaaggaagagcccaatgtattggcatcattactattagagacaccaatagatttccatccatcagctatgagttgcatagttttccttgtgggaacaacattcttcccttccatgtctttcagaagctcttctgctttccatggctgcttcgcttccccaaatccccatataagagtctcgtaagtagtcaagttaggcgataaaccaacgattccacacattttcttatatacctgcatcgctttcttcatttcaccagcactgcaccaaccgcttatgatctgtgtgtagatcactacatttgggcgaacaccaaattttctcatctgattcaagatttgctccgctttttcgggctccccagctcgagcataccctttggcaaggatactaaatgcatgaatatcaggatctattcctccttccaacatatctgtatagatc

SEQ ID NO: 672 - DNA, 633 bp, Arabidopsis thaliana
ccacgcgtccgatcgacacaatgatgcgggaaaaaactgaacaagagcaaagagccatcaaagcagaggagaacctgaggaaaacaagatggaataacgctataactgcagagcggcttcaagagaaatgcaagaggctttctctagaaatggaatcgaagctgagcgagcatgagaatctgacgaaaaaaacattggctgaagccaacaaccttcgtctgcaaaacaaaactcttgaggaaatgcaagagaaaacacataccgagattacacaagagaaagaacaaaggaagcacgtggaagagaagaacaaagctttgtcaatgaaagtccagatgcttgaaagtgaggtcctgaagctcacaaagctgagagatgagtcgagtgcagcagctactgaaaccgagaagataatacaagagtggaggaaagaaagagatgaatttgagagaaaactttctttggctaaagaagtagccaagacagcgcagaaagagttaactctcactaagtcgtcaaatgatgataaagagacaaggctcaggaatttgaagacagaagtagaaggtctaagcctacagtacagtgaattacaaaacagcttcgttcaagaaaaaatggagaatgatgaac

SEQ ID NO: 673 - DNA, 632 bp, Arabidopsis thaliana
cttttttttttttttttttttttaacgtcaacaatactcgaatgtattcatttcaaaaacactacattgttttttattattatttaaagagtaaacaaaggaatccacaccatatgaaccaaattggtccctaaaggaagatggagaatcagtagaaataatgattgttaacgaactgagaagcggttgcaagcgcgccaccaagaatggcatcgatcacaatagtgtctttgcctttcttaccaaccgctgagagcactgctcctgtcgccgcgcctgctaacattgcgtttttccaatctctgctgccacggatacgttcgattccgtattctgttccaatgtacactccaccagcagctccccagtaaacaccttctttacacaacttcttaagcgcatgctccaaagtgctcttggagagactccctttctcgatggccttgtaagtgtcttctgcaagagatttagtgactccaacagctccgatcttgaggaaggcatcaacggtgagattgagaaaagggtttcccatgtccactgccaccgacagcttcggcgtgctaacagtcccggagaatgtgcttgaaggcatcttttcttcttctttcttcctctgtttttggttttgg

SEQ ID NO: 674 - DNA, 632 bp, Arabidopsis thaliana
agtatgcttcctccttcactgtcaaaagttcattgaattagtacggattggagcactagaagaggctgtgaaatatggacgaatggaattagccaaattcattggtttaactacattccaagacattttagaggactgctttgctttgctagtgtacgaacgccccgaagaatcgaatgtagggtatttcctagaagagactcaaagggaagtagtggcagacacagtgaatgctgcgattttatctacaaaaccaaagggcaaaaatcaatcgcattctcatctagagacacttctccgacaactaacagcttgctgtctggaactgcggtcgcttaacgatggtcaaggagaagcgttctcgcttaaccgacttcttagaaccaacaattggaagaggacaaaaaagactacttagctgtgtccatctttggaaacaaacttggctttgattgttgacagtggctgggtttgaactgttacaggcagctacaataagcggtcaaaatagatgattgaaacagacgggttggagttgaacctgaccgttggattcttttcttctctaaagtttgaagaaccaaaattgtaaaatttagttatttaaatttagcttgccaatgttcatcaaa

SEQ ID NO: 675 - DNA, 632 bp, Arabidopsis thaliana
ccaagtccaagttctggtatttcttgaggaagctcaagaaggtgaagaagagtaatggacagatgctcgccatcaacgagatctatgagaagaacccaacaacgatcaagaacttcggtatttggttgaggtaccagagtagaactgggtaccacaacatgtacaaggagtaccgtgacaccactcttaacggagctgttgagcagatgtacactgagatggcatcccgtcaccgtgtcagattcccttgcattcagatcatcaagacagccactgtcccagccaagctgtgcaagagagagagcactaaacagttccacaacagcaagatcaagttcccattggtgttccgcaaggttagaccaccaagcaggaagctgaagacgacttacaaggccaacaagcccaacttgttcatgtaaaacgtctctgattgactcttttttggggtggaatcgatgttgaagctgtgctctctcccgttttggattttatcggttatttttgtttttcaatatgttaggcgtactcatgaatgtgaactcgactttgtctggattttatgcttcttgtttcctacttatgaaaaaacctttcccttaattcctatattttgtgctcttaaaaaaaaa

SEQ ID NO: 676 - DNA, 632 bp, Arabidopsis thaliana
atggattctagttcttggctcaacaatatattcaaaggcttaaagctctacagctactagaatacaaacattggtaagtacattatacaacaattttacaacaacaaaatgcagacttgcgaaatctgctggcgtacaaactgtttctcatattggtgatgttattgaatgttaaacgacggctttgagtagagcctcatgtacagcttctttggttggaagggccgggattgcgcctctcactttaacggttaatgccccgcatgcattcgcaaacataagagcctctctcagtcgctcttcgtcctgaagcaaggagagatcattggctagttgcgatagtatccccgcaacaaatgcatcaccagcacctgttgtgtccactacatccaccttcaatccatgcactctcccactaaaatccttggtgtagtaccgacagccttcaggaccttcagtgacaaggagaagtttcagcttaggatgaaacaacttgcgtacaacattatcatcatacggatcttctcctttcgttagaaagacaatctcctcttcacttatctttataatatcagcagtctcccaaatgctcagaatctcttccctagcattgtctgcagaaggccacaacg

SEQ ID NO: 677 - DNA, 632 bp, Arabidopsis thaliana
ttttttttttttttttttttttttttttttttttttgaaatgaaatgataactataattatagagaaactgataggaataacattttcactttcaaacaatagttcctcaacttttaagtcggcaaataatttcttaaatttgcattgaccacatagaaatgggttccagaataatcaacgctgaatattccagaaaggggattaagcttcggtgaagcttgggggcttgtaggcaatgaaactgatgcattggacttgacgggtgttgtcgaatccgatgatcctaatgaaggcgccagggtactccttcttgcattcttcaacttccttcaacacttgagcggagtcggtgcatccgaacaatggaagcttccacattgtccagtaccgtccatcatagtatccgggagtgtttccgtgctcacggtacacaaatccgtgctccaactcgaattcaacacaaggaatccacttgttgcggagaaggtagtcaacttccttagccaattcaacgtcactaaggtcagggaggtaagatagagtctcaaacttcttctttccgattggtggccacaccttcatgcagctaactcttcctccgttgcttgtgatggaagtaatgtcgttgttg

SEQ ID NO: 678 - DNA, 632 bp, Arabidopsis thaliana
tttttaagtcaaaaacatagaacttgaattcaacaataaactgcaacatgaatgtattgtaaaacgtttttgctccaaaatactacaattaccagatgatagtaataataaatatcttaaaagcaaaactgagactacaagagacaaaaccacaatagtctttataactgcagagatagatagacttagatgatgccgatcttgttagcaacatccaaagcatcatagtctggtgtaagcctcacgtaagccttcttggttccatcaggcctgatgagtgtgttcactttcttggtctggatgtcatacatcttcttaacagcatccttaatcttcttcttgtcagcacgaatgtcaacaatgaaaacaagagtgttgttgtcttcaatcttcttcatcgcagattcagtggtgagtgggtacttaaggatttggtagtgatccaacttgttccttggagtagcgctgatttttgggtacttaccagttctaggcttggtaagagtctttggcctgtggaaggtgaccttggtcctaatctttttgtccttcttcttgaaggcttgaccagacttcacagcctttgccgccttcaaggccttggccttaggatcagccttcttggtagtatc

SEQ ID NO: 679 - DNA, 631 bp, Arabidopsis thaliana
ttttttttttttgttgataccaggccaaaaggcatctccattaatacaagtgtagttgtaatttgtgaaggaaataattgttacgaccacaagagtttgattctacaatgtacaaaaaaaggaattgctatgaccacaagagttttttctctttcttctacacatatacatatcccctggaatatatgtaaatcactatatttgtatgaagataatagattgagaaagatctttggattggtttcctctgtctttctggttcaaatttcagataagatagataaatggataagacaacaacaaaaaaccgcgatttttttaatgaggctatccctaatttttttacttgaggctgaagaaattggaaacagaatcggttctcaagctgttgtaaagacactgtgagtgagtttcccagcttgatgatgtatgatctttagcgccgagagatgtggtgtggtctgagtttatgactgagtaatctaaagatccttgctgatgtaatggaaaagaccgaaaatccgccatgattgactgcttcgagtcaccttctggaggacctgtgaagtaagcctgaaactgttttgcggataaatcatcgatatgacactcaagttctgcggacgcgtgg

SEQ ID NO: 680 - DNA, 631 bp, Arabidopsis thaliana
ttttttttttttatcaaattaattcacctttgatttaatttaatacaatatctggacaattgcttgacctacaagcaagggctggtacaacaaaatctcccagacccggtaaaacaaaacccaaccacaagcaaatattagcagagagagaagcatattcacgcaaagcttcttagttctgctatcaaaattcaaaaacccccaaaaaaaacaaatgaagaaggagagatcttcatttcagatatgaacatcatcaagccacactgagaagacgagactaatactttctcccaagaattataccgatgataacagagatcagcgccactccagtgacgatcttcactgtcatgagatgtgaagttgatgctgtttgagtaggagtagtaacattgcccgaagacgaagaagaagaaagagatgcttctggcttcttcttgctcttacgtttcgttggagaagaaaaggataagtcaatgtctcgagatttgacacctacatccattgcctccgtttccttagttttagcatctgcgagctgcactttctgttcaagatctttgaccattgattcaaattcagtgacagcctttttcttagcttcaatctcttcttgtgatttctttaatgc

SEQ ID NO: 681 - DNA, 631 bp, Arabidopsis thaliana
  misc_feature (1)...(631): n = A,T,C or G
atttccctctccgtcatcgccagaaaccctaacaaaaacgttggattcatctacgacgtcaccgacatcacactctacaaagcatccaccggaggagatgatgacgtagtcattggtaaaggaacgatcgcggcgttttctcacgggaagaagaacacgactacgcttagaagtacgatcggaagtcctccggatgaactcgatgagatctcggngggtaagctgaaaggagatctgaaggcgaagaaagcagtggcgattaagattgttttgaactcgaaggtgaaagtgaagatgggagctctgaaaactcctaaatcaggaattagggttacttgtgaagggattaaattggtggctccgacgggaaagaaggcgacgacggctacgacttccgccgctaagtgtaaggttgatccaagatttaagatctggaaaattactttctaaatatagtaaacaaataatggaatcacattcttagttttttcttcattttctttttattactccattgtttcaattnnnatttctttttaaatttgatttcatatacagttctttgattcctgtaagactttatttttttggtttatgtaaatgaagatataaatatttgtgttcaaaaaaa

SEQ ID NO: 682 - DNA, 631 bp, Arabidopsis thaliana
  misc_feature (1)...(631): n = A,T,C or G
aagcctctcctacaaacttttttatagcaatcacctcaacaacagaaaaaaatgatgtgtttnnnnttttctaggggaaattcgaactccacttagaaaaaagaagagaaaagggcacatctacaatgatacataggcaataaaactggaacttcaaaaaattatatatggtcgggaccacaaaaaaaaacagagaaatcacaaaaaataatcaggggtcttccgagtagtatcaggttcaacttgtcgaggagctggatcgaactggaggaagttttgctccatgttctctcctatctctagaatggcagccatgtttccacaccggtagcaatagtttggtgcactaaacacagtcaccacattcttatcctgacaccagttaaaaccttccatgacaagttgatgcgctcttgatatgagacttagtccattgttgtgattaaattgagctgcgatatcctgtccaaatgtataaccagcacctcgtggagatattccccatccacatcgatcatcaggatcagaccataataaatcacacataggtccttcgtgtggaacctcctgtatccgatccaagcttcggatattatcaagagtatccagagaaggtgaaagccctccatgc

SEQ ID NO: 683 - DNA, 631 bp, Arabidopsis thaliana
ttttttttcttaactgaatttatttattaatttggatacacttattaccgaaataaaggattgtttatttcttacaactcgtcttattagtgttgcatagcataacaaggtgaaagagaaaacatgttacacaaccgaagatggaaatgcaatgagagggaatttgcggcaaacatcgataccaatggcttcagttagatcaggttgatccccatttggtccagcctctaccctccagtcaaatcggcctacaaggttggccactgtcacctctgccagacccaaagcaagatttatcccggggcatatccttctccctgatccgaatgggatgtagttcagattttttccgtgataatctaaagctgaatctaagtgtctctccggtttgaattcttcagcatccggtccccatatcgcagtgtctcgttggatcgcccaagcattgattatcacctctgtccctgcggctatgttatatccctttactttgacatcttcacttaagagtctgggaagtatcattggaagagaaggatgcaatcgaagcacctctttaatcacggcttttaagtatttcatattttccacttctttttcttttatgtatgaaccatgtggcctaatagtt

SEQ ID NO: 684 - DNA, 631 bp, Arabidopsis thaliana
tccaaaagattcagaaagaggctcctgttgagttccagaacaaccttgtacaagtgaccaaatacaatgctgctcaacactgcaagacttggatcgttggaaaatggttaacaccaagagagcagagctgggctcctgcagggacgcatttccatcagtttgtggtgccaccaatccttaagtttagaaggaactgcacttacggtgatctagcagctatgaagctccctaaagatgttgaaggactcggaacttgcgagtacacgatggagagaggggtggtacatgcgtgccatgcaggaggagtggttcatatgcttgagggttggaagcatcatgaggttggagccattgatgttgaccgtatcgatttggtgtgggaagcagccatgaagtatggtcttagtgctgtttcttcactcacaaattgagtgaagagagagacacgtttcattgttgtcttttgactctcccaagattggtcattctttgtacaggtgaaaggagatgcaagcaggaaaaaaaagtagaatttcaccttatgtattgttttatcttttattaatgatgtattactttctttttagatttccttaatattaatatatgcacctaatttccaagaaaaaaa

SEQ ID NO: 685 - DNA, 631 bp, Arabidopsis thaliana
  misc_feature (1)...(631): n = A,T,C or G
atcgttggctttcaaggctaaatctgattttgttcaagaaccgatgcctaaaaccgcgatttcgaagctttggagacggttgcaagaaccggaagcagagcatgctcagctaattttcactccatttggtggtaaaatgagtgagattgcagattacgaaacaccatttccgcataggaaggggaatatatatgagattcagtacttgaattactggagaggagacgtgaaagagaagtatatgagatgggtggagagagtttacgatgatatgagtgagtttgtggcgaagtctccgagaggagcttatataaatctgagagatcttgatttggggatgtatgttggagttaagaggagtaagtacgaggaagggaagagttggggagtgaagtattttaagaataattttgagagattggtgagagttaagacaagtgttgatccttctgatttcttctgtgatgaacagagtattcctcnnntnncgtttgttgaagttatttgaaagatttgaaaaaatgaaagaggcgagattttgtgcctgtaacaaagagatagtagtagagtgaagtgtctgtttatatgtgatcttgtcaagtttagatgaaaatgaagttatttttgtagt

SEQ ID NO: 686 - DNA, 631 bp, Arabidopsis thaliana
atccacattttcttgcttaactgcagaacaacaccaaattcgaccctatcaagttttgattcgtgtctacatagaaagagtctcaattgttctgtccctggacttttttttgtttcgtttttcttgttaagatcgaaaactctgttttggtagatttttgtgttcttgattttgattcaagatggggaggctgtttgtggtgaatcttgaagggaagatctatagctgcaaacactgtaagactcatcttgctacttatgaagacatcatctccaagtcttttcactgcaagcatgggaaagcttatctcttcaataaggttgccaatgtttccattggagagactgaagaaagactgatgatgactggtaaacatactgtggctgatattttctgtgtctcgtgtggatcaatcgttggctggaaatacgagactgctcatgagaagaaccagaagtacaaagaaggaaaatcagtgcttgaaagatttaagatatcgggtcctgatgggagcaactattgggtgagtagccatggaaggcatataggtggaagtgatgcagatgatgcttgaatcatctctctctctctctattctctgatttgaccatttcatgtaaatgtaaattat

SEQ ID NO: 687 - DNA, 631 bp, Arabidopsis thaliana
cacgcgtccgagaatttgaaccaacaaagcaaaacatgaaaggcacattcactaacttgcttgtgctccttctcattgcacttgtttgtgccaatgtcggtgctaggaaacttatctccgaagatacccaattcaaggatgaaaaatctttcctcggaggcggtggcagcggtgatggcttagggcttggccttggtggaggagctggtcttggtgggcttgggattggggctgggatcggcgcgggagccggactagggttaggtggaggcggtggtggactcggaggtggtggcggtggactcctcggtggaggcggctttgggggaggagccggtggcggacttggtggccttccttgaacgtattgacaagtgtgcgtgtgagagctgattctcagcttattactaattaattaagttactttcattctcttaataaaatctagagggtttgaatttcggatttcttcagctttaatttaaacttcaatatttgaaccaaaaaggtcttgctactagaggtaatgctcgtaatcgtattatgtgtaacgccggttctgatattcttaagtgcaagtgtggaacgtttctcttttattcactatatagcattactttcttttttcttg

SEQ ID NO: 688 - DNA, 631 bp, Arabidopsis thaliana
ggtcgcggccgaggtacagtttgaagatcgacttttcactttacagatctgggatacagctggacaggaaaggtttcagagccttggtgtagccttttaccgtggtgctgattgctgtgttcttgtatatgatgtcaattccatgaaatcatttgaaaatctgaacaactggagggaagaatttttgatccaggcgagtccatcagatccagagaattttccatttgttcttatcggaaacaaggttgacgtggatgatggaaacagcagagtggtttcagagaaaaaggctaaagcttggtgtgcttcaaaggggaacattccttactttgagacctctgccaaggtaggtactaatgtggaggaagctctccaatgcattgccaaggacgcattgaagagcggagaagaagaagaactatacttgccagacacaatcgatgtagggacgagcaatcaacagaggtctacagggtgtgaatgctaaggagtatcaccagaaggaaacgaggcctctcctcccattatctcttttcgcaagttatgtctacattattactatgttgtaaattttttcttttgtgtggaaaagggatgagaacaaaaaaagaaggaaccctaaaaaaaaaag

SEQ ID NO: 689 - DNA, 631 bp, Arabidopsis thaliana
  misc_feature (1)...(631): n = A,T,C or G
gcggccgcttccgatttcgattcgattttagcggcgatgtctctcagacctagcgcgaagacggaggtgcgacggaatcggtacaaagtagcggtcgatgcggaggaaggacggcggaggcgagaggataacttggttgagatcaggaagaacaagagagaggaaaatttgcagaagaagagatttacgtcttctatggcttttggctcagcaacgggacaaacggaacaggatctttcttcagcgaaccaattaaaagataatctacctgctatggttgctggaatctggtcagaggatagcaattcacaattgnnnnnnacaaatctcttgcggaaactgctttctattgaacaaaatcctcctatcaatgaagttgtacaatctggtgttgttcctcgtgttgtgaagtttctttccagggatgacttccccaaacttcagtttgaggcagcttgggcgctcaccaacattgcttcagggacatcagagaacacaaatgtcatcattgaaagtggagctgtcccgatattcatccaacttctcagctctgctagtgaagatgtcngcgaacaggctgtttgggcattgggaaatgttgctggagactcaccaaaatgccgggatttag

SEQ ID NO: 690 - DNA, 630 bp, Arabidopsis thaliana
aagccaaacaaatggcgttcaatatcataacacctggtcgtgtttattcagccacgtctgtcaccttcgtttcaccattaaagcagctttcgttaaaccttcttttgcctctcggtctcatcgtaacctccttcgtttctcatcatctcctttgtcatttccgtcgctccgtcgaggctttcacggtggtcgtattgtgtcaatgggttcttctgctcctgaatcggtcaataagccggaagaagagtggcgtacgattctttctcctgaacaatttaggattctcagacagaaaggcactgaatatccaggaactggagaatacaacaaagtattcgacgatggcatctattgttgtgcaggatgtggaactcctctctacaaatccaccaccaaattcgactctggttgtggctggccagctttctttgatggactccccggagctataacccgaacccctgatccagatgggagacgaatcgagatcacatgtgctgcttgtggaggacatcttggtcacgtttttaaaggagaaggtttccctactcctaccgatgagcgacactgtgtaaacagtatctctctcaagttcacaccagagaatccgaccctgcaataatatgatca

SEQ ID NO: 691 - DNA, 630 bp, Arabidopsis thaliana
ccaggaacttctggtcttcgtaagaaggtgaaagtgttcaagcaacccaattatctagagaattttgtccaagcaacattcaatgctcttacggcggagaaagttaaaggtgccacacttgtggtctctggtgatggtcgttattactcaaaggatgctgttcagatcataattaagatggcagcagctaatggtgtacgacgtgtgtgggttggtaaaaacactctgttatcaactcctgctgtatcagctgtgattcgtgaaagatcaggggctgatggatcgaaagcaactggagcatttatcttaacagcaagccacaatcctggtggccctactgaggattttggaatcaaatacaatatggaaaatggaggacctgctcctgaatcaatcactgataaaatttacgagaacactaagacaatcaaggagtacccaatagcacaagatctgcccaatgttgatatttctgctgttggtgtaaccagttttgaaggacctgaaggaaaatttgatgttgaagtttttgattccgcagatgactacgttaaattaatgaagtcaatcttcgattttgaagccatccggaaattgctatcatctccaaagtttacattctgctatgat

SEQ ID NO: 692 - DNA, 630 bp, Arabidopsis thaliana
ccacgcgtccgagctcattctctcgcttccgcagcggagaaccatcccctcgccgagacgttgccggcggtggcgacggagttcagatggcgaatcccgcgggatcaaccggtggtgtgaacctcgacaagttcttcgaagatgttgaatctgtgaaagaagagctaaaggagctagatcggctcaacgaaacactctcttcatgtcacgagcagagcaagacgcttcacaatgctaaagccgttaaagatctccggtctaaaatggacggtgacgttggagtcgcgttgaagaaggcgaagatgattaaagttaaactcgaggcgctagatcgactgatttccactggagagagtgagagattcttgcagaaagcaatacaagaacaaggaagaggaagggtgttagacaccattaacgagattcaagaaaggcatgatgcggttaaagacattgagaagaatctcagggagcttcaccaggtgtttctagacatggccgtgctggtagagcaccagggagctcagcttgatgacatcgagagtcatgtgggtcgagctagctcctttatcagaggcggaactgaccagctacaaaccgctcgggtttaccagaagaacacgcgaaaat

SEQ ID NO: 693 - DNA, 630 bp, Arabidopsis thaliana
  misc_feature (1)...(630): n = A,T,C or G
caaggcataatgatgaagctctcgtggttcctcacagagtttctttcgagttgactggtgaagacgttgcacggtgtcttgcaagcaagctaaaccgttccggttcacatgaaaaagcaagcggcgaacatttaagaccaaactgttgtaaaacgtcgggagaaacagagagcgaacagagtcagaagctaagatcgttttctacaggctctaacaaagaattcaagtttgatagcaccaatgaagagatgatagagaaaattcgatcggagtggtgggcgaatgagaaggtcgccggaaaaggtgatcacagtccaagaaacagttggactttctttccagtcttacgctctggacatacttagcacaaagaaatagcttttaccttcttcattacctctaacatgggaagcaaagtcagtgatatggtaagagattggggtctaacaactatacatatatatagcttggtattgtaggtgtctttgttctttgtactgnnaattatataaaatagttttaacacttaaatggtagacttatcattgacaaaagaaaagaaactgtattctttcttggttatgtataaacataaaaatcatctctttactatattgtcttaaaaaaaaa

SEQ ID NO: 694 - DNA, 630 bp, Arabidopsis thaliana
cttttttttttttttttggagtttaaagatacaaaagttataaactaattatacaaactgtattattcttttcttactcaagacacagaactaccttcttattattactgcatattacaaaaataataacaataataatgttacaaaatctcatatgttttctttatcgcctttgtcccatagcaaccacagggagagtcactttatgccctcggcttcctttcaatgtaacctgtccgaagctataagctccagtcactgatctcactgttagagtcaccgaaaaggttctagaagcgcccgctcttactgtcattgcaggaggactcacttcgatggcgattgctggctccatcctcgatgtgattgtgtatgtttcttcttcttccgcaacattcgtcactcttctggttacggtttgtgttctgacgagatgagagatggctatggatggcgtgttgaagtttgaaggatgaaccattttgaaattgcatggagtgtttgtgaagttttttatctcgtgagcatcgataccaggtgtggtgcacaagaaccctatataatcctcataacctgcatcaaagatgagaccagggtctagagcagcgcttggattgacatgaccggacg

SEQ ID NO: 695 - DNA, 630 bp, Arabidopsis thaliana
tttttttttttttttttttcataaagaggttccactttattcaacttcttaattagaaaaatcttatagagacgatcgaaccctcttatataatttaaaggttctagtgttaggcactagtttgcttaaggagatactcatctatctctttgaagttcttgacagcaaagtccttgatgacgtgtgggtcatcaatctcatgggcggtcttctcaaactcaccagaccatttcagaaggctgccaccgttcttaggaataacggtgatggttcctttgaacgttttgtagtactccaacatttcgccgccaatgatgctgtatgacatgcttttgttctccaaatccactgcttcgatcctctccgccgatatcttcaccagtggagatccttctccataagtaatgaggcgaatggagccaggagcgttgccgtcgccggctagaacttggatggttttgtagtcgttagggaaagctttggggaagagattgatgccgtcgccgagggctacccagaacttttcagccggagacttaacctcaacctccacatgaagaacaccactcaaccccatttgtttctaattaaaaaaaaaactcaattattttgtatgtctttgaacggacg

SEQ ID NO: 696 - DNA, 630 bp, Arabidopsis thaliana
  misc_feature (1)...(630): n = A,T,C or G
ggcttacaatcaaaatccacaaatgttggctctatgcataacagtagcagtaatgttccttggtgtgagatcagaattgagtcaggatataaagggatgtcaggatgcgatgtctgatctctactcttgtcttccttttgtcactaacaaagctaaagcaccagactcaacatgttgcagcacactcaaggtaaaaatagacaaagggcagaccaggaaatgtctatgtactctagtcaaagacagggatgatcctggtttggggttcaaagttgatgccaaccgtgcaatgagcctcccttccgcttgtcatgtccctgcaaacatctctcaatgcccagatcttctacatctgcttccagattcaccagcctctcaaatatttaagcaattcactgaatcttcttctcagactgttggacataaagcggtctccacaagctcaagcatcaaaggaagagacaacaagcaatttggtttaatgatggctggtgctctctcaatatggtatataatgtaaaatcctctgtgatctaaagttgatgaacacaatnnnnaaaatcattanannnntcatatctactagctgaagcagatgtatcatggcttattaataagaacttattgaga

SEQ ID NO: 697 - DNA, 630 bp, Arabidopsis thaliana
  misc_feature (1)...(630): n = A,T,C or G
ctttttttttttttttagagagaaaaaaaaattgaatcaaaaccaaagcgannnnntcaatggcagcattcagacagacaagaacatggtctctccagtttctatcttaattatacgtttctcaaaaaaaaaaagaccattcctttacgaccttcttgcatccaaggcaacaaacataggcgaagctaagagcttagtaccgtctgaaactgccatcatctcacaaaccctctttacttcgaagcgccctccagaatatgcgtttttgagaataggaagtcatagattggtgctcaatattggcgccttggaggcctagcctcagcttccgagactctaatttgtctaccgtccaaatcagcaccatccaaggacttgatggcattttggacctcttgagaagagtcgtatgtcacaaatccaaaacccttggatcgaccactgtccctgtcgtagatgactctggcctcaacaacctttccttgctccgagaacaaactctcaagagccatgtcatcaactccccaagagaggttacccacataaacacggtttcctgaaccagcaccagaaccagcacctcctccatatccagaacctgagcttccaaagctgctcctaggtcctctg

SEQ ID NO: 698 - DNA, 630 bp, Arabidopsis thaliana
  misc_feature (1)...(630): n = A,T,C or G
ttttttttttttttacttcatccaagtaatagctgtttcttaaattagatctattagttgtacaaatgcgtgattgcttgtagcaggtattgtaagaaaagagtacactcaaaagagatcaaaattgaggatatctaccagataattagaaggttacaattacaaaggtttctgtattacaacgaagttgaatcagagcgtgttctttgtccaaagcccatcattgagttacccaaatcaaagtccaatataaagccttctaattgtagcccacccattacaatcgggttgactcgacttgacccgccgtcaacaatccccgagcatcggactccaccaccaacatccaccatcagattcttcccatgaatcctccaccgcaccatctcactctgcaacgctagatctaccgccggaaaatctacgtcactagtgaagcagagcccaaacggtgcgacaggaggcaccgatgtagcttcactcgcagctttggcgtaannntccgcgaacaccttgtagatcgagctctctaaaatcgtgtaaggaaccaccgtgctcagctccaccgccaacggaccttccacggagagcttttccccgttgactctaatcgatttcacgttaattacg

SEQ ID NO: 699 - DNA, 630 bp, Arabidopsis thaliana
tttttttttttttttttttggaaaattaagtagatttcatagccgtgccataaattaaaaccctaattcccatattacataaccctcaaagatacccaaaagcataaaccctatttcacattccaactactactactacttctcctccattacaaaaccacattccaaatctaagaactcgtaaacttcgtaaccgccttagtcccttcagaaacagcatgtttcgccaactctccaggcaacacaagtctcaccgcagtctgaatctccctagaagtaatcgtcggcttcttgttgtacctcgcaagcttcgaagactcaccagcaagtttctcaaagatatcattgatgaaactgttcatgattcccatggctttgctggagattccgatatctggatgaacttgcttcaacaccttgaagatgtagatcttgtatgtctcaacgttcttctttgatctcttcttcttcttgtctccggcgccggctggttccttcgggagtttctttccggcttttggtttcttctctgccgctgctgctggttcggctgccggagttttctctgccggtttcttctccgctggtttcttatctgccttcgccattttcaaacttttctagggagtg

SEQ ID NO: 700 - DNA, 629 bp, Arabidopsis thaliana
atatctgatgcttcattgaattttgaatatcacattcacaaaatacagtaagtgatggtgctagagcatacaaaactcttgcaagtgtctctgtaaccaaatgtggaagatatagctgtctagaagtggaagtaaaactatggaccctaagatatcaatgaaaattgcattgttgcataaaaggagaagtgtaatcaacgtatctctcccacaaaggtttgtacttctctatcccgatcttcaaccatggctttaagttcccattgaagtgaagaacagctcctttctctatcacacgagcatccacattcgtgtatcccaatcccaggatatgccaggacgcctctagtgcctctgttaacccgtaaaatgtcagaagtcctggaggtagtgttcccagtttccataaggtccggtccacgtttttttcttgccagtagtggtatatgccggtcacatttctcttcctccactcaactaaatcaaagacgttcattccaaacgcccacccacacgcatctggatcaaagtgggagcgtatgagaggatgagaatagttcaagtacttgtggtagcggtggaaggtctccatgcaggtctcaacagccccgttcacatttttgtttaaa

SEQ ID NO: 701 - DNA, 629 bp, Arabidopsis thaliana
attcaacagtaaagttcgaagctttacatagagaaattacataaaaaccaacaacaacagatcaagactccaaagtgttaccaagaggaaatgagaagacttcacgaacaggagaaaactcaacgagaccaatctccataccataaccattcaccggaagcttcaaatctctcaacacagagaaagcctcagccatacgagacttaggaacatcaagagccacgggacaaaacggaacccaagaatcaacacgatactcttcaccaatgtcaacagattctttcttcaacatatcacataactgagtctgcaactgaagaagcgatagagacggagtcggagatagaaacagtacgttgttgtcgctagagaagctaccgatagtagagaacgagatcgagattggttcttgcttggatacgaagtttttgatgacggattcgagtctcgttgaatcgaagaaggaggtggagaagagtgttatgtgtggacgagactcagtgttgatcaatttggtactgatttgacggcgagcgaagacgttccatgctttcaatacttggttttcgagtgctggatcgaagtatagctcgattgcgtagccttctgacattttattccaagtcgga

SEQ ID NO: 702 - DNA, 629 bp, Arabidopsis thaliana
ccactctgtttcccctgattccactgcacaccatcaagagggttcactacaccggggaaaaagtctccaaaggccaacctgttgaccttgtggctaatattgtagttgccttgctggaacaataacatatcatgaaattgaaaaccggattgatgaaagctttgcccaggaatgaaatgaaagttcccagcaactttgttaacttccaagaaaccgtgaacattacaaccttcaccttcttcatcttttaccttttgcacaaagccttctcttttacactggtcgattgattcagggtccgagagggcccaacctttctttcggtaagcttcgcgaacttcctcacatgaattacaacaagcatcatctgacgcttctgctccaaaacaggaaccacagtatgtttcattgtgttccaaccttccaccatgtttttgtaaaggtttttcaatcttagtatgaccaattccgtcttgttttgcctcgatgacattgccagaagagtctaatctccttttaataatgtcatgtcgcacatcaaggtgcctctccccactgatatccatggaatcaagactaataatcgaacattgaagcgcagggaatgtaacatcaaaattaatccgtag

SEQ ID NO: 703 - DNA, 629 bp, Arabidopsis thaliana
  misc_feature (1)...(629): n = A,T,C or G
aaacgaacaacaatacttttataaataaacgttggacatacaacaccatgatgatattaatatnnnnnnnnngatggacacacattaattaagataaataaaaggaggatgtgatgatgattaagcatcgatccatcattcctggttttggaggatgtggtcgtccatgtgagcaatcatctgttccacgaacttcatgaattcgatgggctctggggagtcttcggtgcgtttctcccagaccatagtaattttgcagacgcagccatctttggactcggggatgaaatgtaacgtcgtgacataaaccttgaggacctccatgacgtgaccatcgagtccattgatcgtcaccgccatattctcgtcgtccatctctatcctctccttcaatacttcctctttcccatcacgagtgtagttccagattttgatggtgccgtgagagtcccaatcgccgtcatggacggtgacaccttggatgaggtggccgatagcttcagggacgaggtggttctcgctcctccacctcttatagtgtttctccgccgatcccttaagaggcacatccgtcacgtatgttcccgacatcgccattgatgaatcaattagctttggattgttttttg

SEQ ID NO: 704 - DNA, 629 bp, Arabidopsis thaliana
cgactctcttaatctctatttcctctcaaaaagtgtagttttgtgacaaaaactgttttttaaagttagctataagaagatgaggaagatcatagggtttagaatcgggagacgagtctcaagatggatctttcgcaaaacccggatccaacgttcaggatacaaccggatacactcgacccagcaagcttgcatgctgatgagaccattagccaaactcaaaagttggggccaacgtctcaagcaaagtttcagacgcaggtctacgagaagatccgcatacatacccgttgatcataagaaagccgacccggttccaaggggacacttagctatctacgtgggtcaaaaagacggcgactgtcatagagttttggtacccatcgtttactttaaccatcctttgttcggtgagctgcttcgagaagccgaaaaagagtacggattttgccacgaaggaggtatcactattccttgtctgtattcagatttcgaacgggtcaagacccggatcgcatcggggtcaagttctcgggtatttccatggggccgtcattgccgcaattgaagacaattatggaaatagttcttaggattttcaagcttttattttctttgtagatattgtt

SEQ ID NO: 705 - DNA, 629 bp, Arabidopsis thaliana
cgccaatacgctcgtctcgagccaggtttgaacggcgtggttcgttcttacaaacctcccgttccaggccggtccgattcccctaaggcgcaccagaaccaaaccaccaaccaaaccgtgttcttgaaaccagccaaggttcatgacgatgacgaagacgtgtcgagcgaagacgagaacgagacacacaacagcaacgccgtgtactacaaggagatgataagaaaatccaacgccgagcttgaaccgtccgttttggacccgagggacgaatacacggctgatagctggatcgagcgtaacccttccatggtacgtctcacagggaaacatcccttcaactccgaggcgcctcttaaccgtttaatgcaccacgggtttatcacccctgtcccgttgcactacgtccgtaaccacggccacgtccctaaagcccaatgggccgaatggacggtcgaggtgaccggattcgtcaaacggcccatgaaattcaccatggaccagctcgtctccgagtttgcttaccgcgagttcgccgcgacgctagtctgcgcggggaaccgccgtaaggaacagaacatggtgaagaagtcaaagggattcaactggggatccgccggagtttccac

SEQ ID NO: 706 - DNA, 629 bp, Arabidopsis thaliana
cgacgtctacgtccgagtcaccggaggtgaggtcggagcagcgtcttcactcgctccaaagatcggtccactcggtctggcaccaaagaagatcggagaagacatcgccaaagagacagcgaaagaatggaaaggtcttcgagtcaccgtgaagcttacggtacagaatcgtcaagctaaggtcacagtggttccatccgcagcggctctagtcatcaaagccctcaaggagccagagagagataggaagaaagtgaagaacatcaaacataatggcaacatttcgtttgatgatgtgattgagattgctaagataatgcgtcctagatctatcgctaaggaattgagtggaacagtgaaggagattttaggaacttgtgtctcttttggttgcactgttgatggtaaagaccctaaggatcttcaggaaaattaacagtggtgacattgatattcctaacgagtgataaaggtttttacttttgagttctctatcgttttattttttgtatttgattttgaggatttggtattagtaatactatatttcggaagttgagaattgttggcttttgcccatttgaatcctttcttgggattaatcaaaatgttcaattttctacaaaaaa

SEQ ID NO: 707 - DNA, 629 bp, Arabidopsis thaliana
tgtaaaatacgtggaaccaaaatgatttaaggtgaacatcatccaagacaataaccaaattttgcagaacaaatataatggtaataaaaaataataaccaaaaacaaaaggactaaaattctctccccagaagaggaaatgttgtgctcacagacagcgcccataagagcttctatgtgcacataacttacctcttcttattttcgcccgcagctattgtgacttcatcaatatcaaataatcccccaacagtaatactaaagacccttcactccgccttggttccctcggcctcagtcacagctacaggtttctctccctctcccgaggcagcagcatcaggtttcgctgtttcaacacttgcgtctttggcaggtgaaggacgtttttcctctgtcacctttggatctgcaggtttcccatcttttaagtccttagcgtctttccctccttttgcatccttcccatctttcccagcttttgcatctttgccatctttcgcatccttcccatctttggcatctttggctggaggaggaggcggcatcatgtgaggtgggggatttgtcttgagcttcaagaatatctgcctcattctccctagatcagttggcttcccaggtttagga

SEQ ID NO: 708 - DNA, 629 bp, Arabidopsis thaliana
gcaaaggaggcagcctctgctccacaggccgtccccgctgaggaggaggagaagaagaaagatgtagcggaggagaagaaagtggcggctgaggaggagaaaccaaaggaggaagaggagccgcaaccaccaccaccgcctccacccttcatactctacgtcgacttgcattgtgttggatgcgctaagaagattgaaagatctattctaaaaattagaggtgtggaagaagtggtgatggatatgaatgagaaccaagtgacgataaagggagtgttggatccgcaagcagtgtgcaacaaaatcaagaagaagactaaaagaatggccaaagtcctctcgccgcttccggcagctgagggagagcctctgccaccaatcataacctctcaggtctccggcggcctcaccaccgtcgagctcagcgttaacatgcactgccaagcttgtgctgaccagctcaagaagaagattctcaaaatgagaggggtccaaacaactgtgacagagcacaccacgggaaaagtaatagtgactgggacaatggacgctgagaagcttgtggattacgtctaccgtcggaccaaaaagcaagcccgaatcgtaccccaacctgacccggaacctga

SEQ ID NO: 709 - DNA, 629 bp, Arabidopsis thaliana
  misc_feature (1)...(629): n = A,T,C or G
tttctcggcatccaaaaatgtctctagttgcgaacgaggagtttcagcatattctgcgtgtgctcaatactaatgtcgatgggaagcaaaaaattatgtttgctttgacctcaatcaagggtattggaaggcgattggctaacattgtgtgcaagaaggctgatgttgacatgaacaagagggctggagaactaagtgctgctgagattgataacctcatgacaatcgttgctaaccctcgccagttcaagatcccagactggtttcttaacagacaaaaggattacaaggatgggaaatactcccaagttgtttccaatgctcttgacatgaagttgagagatgatcttgagcgtctcaagaagatcagaaaccatcgtggtctgaggcactactggggtctccgtgtacgtggacagcacaccaaaaccaccggacgccgtggaaagactgttggtgtttccaagaagcgttaaaaagagtttgagcttggttcaatggctttgttttgttttttgtattgttgttttttgcagannnnagtttaagagatgttgtttcatcaaaagacggtcttagcttttacaatatataattgaatccaaaaaaaaaagaaaaaaaaaaaaaaa

SEQ ID NO: 710 - DNA, 629 bp, Arabidopsis thaliana
gtcctagtccaaagaaggccaggcagggtggaagctattccaggtcaccagtcaaatcccgctcccctcgtcgccgaaggagcccaagccgtagccgtagttacagtcgaggtcgcagctacagtcgatcgcgatccccagtgagaagagagaaaagcgtggaggacagatcacgcagtcctaaggcaatggagcgatctgtatctcccaaaggtagggaccaaagcctgagtccagaccgaaaagtgatagatgcaagcccaaagcgtggatcagactatgatggtagcccaaaagagaatggtaatggcaggaactctgcgagtcccattgttggaggtggtgaaagtcctgttggacttaatggtcaagacaggagcccgattgatgatgaggctgagcttagccgtccttcccctaaaggcagtgagtcaccttgatggttcacaggttaaaagctctatgtagcattctgtactgaaggatgttgtttcctttccctttctttctgcgtgatacttttcttttcgttgcgtgacaatcctggatgttactttgccttctctcttgatgactcttggtttgttttccgacaactttcaaactctgcgatgttacttttcattgtt

SEQ ID NO: 711 - DNA, 629 bp, Arabidopsis thaliana
ctttttttttttttttttttttttgtttttttggttcaaacatacggaaggatttagatttaaagaatgaaaaacaagattatggtaagagttttccaacatctcttattttattgttatccaatctcaggaaaccaaatatgttcatacaatacaaaaagaatttttgcctcttttgtctgaatataaatctcaattggattatgcaagctgtttggcttcgatatccttgagtctgagagtaacggctctcttgtgtgcatctaaaccttcgatttcagccatagttgctacataagggccgaggtttctcagaccttcctctgtcaaagattgtacagtcatgaactttaggaaagagtcgagagagacgccactgtacattcttgcatatccatatgttggaagaacgtggtttgtcccgctcgcataatccccaacactctctggagtccatggtcctatgaaaaccgagcctgcgttctcaatcagtccctcccatttctcagcgtctttgacattgatgatcaaatgttcgggtgcatatagatttgagaaagatattgcctcaatcatatctcgagcaaacactgtgaaactgtgacttagtgcttttgaagcaaactctc

SEQ ID NO: 712 - DNA, 629 bp, Arabidopsis thaliana
aagaaactggttttacaataagtttggctttgatgatttgagcgcaatggtcaagagacatctggatacaatcaaacaaataaagcgttatcaatccaccattcatctcctctagtccttcaaaaggcttaagagccattaaccccatttagaattcttcagatcggagatccatgtgttgttataagatttcagaaatattgattggcatctcagcgatgagtatgccactgctttcttcgaggcttttgagagtcgttacttcacctccaacaaccatgtttatgactattccacctgaagctaagcaagttgttatacgccttgtatatgtttccttctttgtaggaagctcgtagtttatgagaacgcgtgcggatagagaagattctcctgatgagagtaacggaaggcaaacatcggtcacaactaccaaatgagatgtcttttcttcttttccgttttcactctcttccaaaccttcttctaccacagagttaagttgctggttccagttgattgttgcttgcctgaatttctctataaccatagctcgttctctatctgctagatcgctgtacaaagcggctaaggaaatgtaaggaagagtggataaggaagaacagacg

SEQ ID NO: 713 - DNA, 628 bp, Arabidopsis thaliana
atatgctctctattgttgagttccatccacagtgcgtccaaaacgctccaaccgcaggatgggccaatgtctctagttgattcacccatttcacaatttttccctgatgaccaatattttccaaaaacccacaaggcaatgactcaagccactcggttccccggaccatcccgggcctaaccacccacaagaatggtagttcgctgtttcttagaccccaagcaatttcgaaaaactcattctcttctatagctgcaaggcttccaaaactcacatagaccacagactgcggagcttgcttgttaagccaatcggttaatatttcatcatcgtccttgtccttgttctttggcttcggtggaagatcggttctatgtttgtgaaacggtccgattgggaacaacggaacttgtaacttgctgcgacaatccatgagtgaatgtctttcaagatcttcaaatgtgttccatacgactccggaagataacttggccccttccaccatgtcgttaagtattcggtttagtccctcaggctctttcgtttttattacaggaagatccttcactttcaaaggtggaagctctgtcactagctcatctaatctagaaccttgtataggaaggta

SEQ ID NO: 714 - DNA, 628 bp, Arabidopsis thaliana
ccacgcgtccgccttcgtttacatgtctcccgagtatgcggtgcatggcaaattctccatgaaatctgacgtctacagctttggaatcttgattcttgaaattattagcggcaagaagaatagcagcctctaccagaacgatgaaactactactgctggcaacttggttacctatgcttggaggctttggagaaacggctcgcaactaaagctgctggattcgtccataggaaggaactatcagagtaatgaagtcactagatgcatccatattgctcttttatgtgttcaagagaatccagaagaccgtccaaagttgtcaaccattgtctcaatgcttaccagtaacacaatcagtgtgccagcgcctggcataccgggatttttcccccaaagcaggcgtgaactggacccattatctgagggattagagtcgggttaatatatgaacgagcaggtttttcctcatcatgtctgaaaataaaataaaaacaaaaaaaatagccagacatcatttgattctccacaaataaggaacatagtaagtttctctgaaattttaggctgtaaactatacattatattcagttcagtaagaaaataagtttcggtgataaaaaaaaaaaaa

SEQ ID NO: 715 - DNA, 628 bp, Arabidopsis thaliana
  misc_feature (1)...(628): n = A,T,C or G
catataagtctcagtactctctgttctgcaaacttcatacacaaaaccaacattaagagatggcgagccactacagaaacacaagcgctattgcttatctattgctttgtctcttcattacatctgccactgcacattccttcatacgacaaatcactgatgacctcaaaacaaatctgcagcaggaggtaggagcagaaccaatccaaaacctggacgtaggacattacttacaagaaaataaggagatctcatcacgtgattataaagtatcagcttcaaacgcagtgaaaggtttgagagatcgtcctccatcgtcttactctctcaagatggagtctttcaacacgctccttaagtcaacttacacggagaaatatgtatctcgtcccttttcagttggtggatacaactggacacttgttgtgttcccaaatggtaacaagaaggatagtggttcagggtacctttctctttacgtagccatagacaactcaactctcggacagcaagagatttacgcagatctnnggttttacatctttaacaagaatgagaggaagtacttcactatcnnngataccgatgtgtggaagtttagtgtcttcaaaacgatgtggggattctc

SEQ ID NO: 716 - DNA, 628 bp, Arabidopsis thaliana
ctttttttttttttttttttttttgacagctgaaattatttattttgcagaggacagaccagacaaaaaatacctcaggaagttaccaatctataagacgaattgttaaagaccaaaacaaattttggtaagtatatgaaccaaatggaaaaaaatgaaacatgtgatcagagttaacaatgtagaccagcagttctggttctggatgtgcacgtgggttggtccgaggtttattatgtagtaatccaagattcatttggtaaacagttggatctttctcacagaagaagtcttcgaacatcctcaaagtttgaacgcaattcagacataaacgaagctccaacttgtccatcaaagatccgatgatcagcggataacgttacattcatttttgtcacaacagaaggcttctcaattccatctagtccaataactggctcaaccactttgtttcctctaccaactgctagaatcccagcctgaggggggttaatgattgcgcagaaattatccacaggatacattcctagatttgatatgctgaatgtccctccttgaaactcatgaggagcaagctttccagatcgagccttttgtgccagctccttaacctctaaggaaatagcag

SEQ ID NO: 717 - DNA, 628 bp, Arabidopsis thaliana
  misc_feature (1)...(628): n = A,T,C or G
tcaaactcaaaatcatttccaatcaaaatgtgctcaaaagcatacaattttgtttccaatacttgtaatatgcttataaaacataacaatattggatcgttgaaatatatatacaaataatatcatcacaaattgaagaagatttgaactaaacaaataaaagnaaactttcatcaccctctctctttcttgattatttgttttaacaaattcatatatcgatctacttgtaatagataacaggcgcattagctctggcatcccacataccaccttcctttaaatactcaagatacctagaaaactcaggcttcgtcgtcgtcgacttcttcttctttccgtagaaaagactaaagattgggtgactaaatttgcctgttggtttgactttctttgatttctgacgaggaagctcctcaagaatggtcggaacaccaccagctccaagctttatagatggtgcgtagtaaggaacactcgtcgatctccttagctttgctccgagtaaactgaaagttgaatcatcactcactctctcgtatcctccacgacggcttcttgtcctcgtgctcaagcttcttagcatttgcatctttaaactgtgtatataaagaattcaagaaagatg

SEQ ID NO: 718 - DNA, 628 bp, Arabidopsis thaliana
  misc_feature (1)...(628): n = A,T,C or G
gatagcgggacttcagctacacttgaaggtgtgcaacaaagcagtgggaccagtggtcagcagcttttgcaatctctcttttctggtagttctcgttcagatgagactggtcttagacgcgggcaaggttcagatgatcgtgtagatgtctcaagtgcaatgtctcaggtcctggagagccctgtattggatggattgctagcaggggtatctcgacaagctggtgttgattcaccaaatatgctgagaaatatgctccagcagtttacccagaatccacagatcatgaacacagtccaacagattgcgcaacaggtggatgggcaagagatagaaaatatgatgtcaggtggagctcaaggcgagggcggcggctttgatttctctagaatggtccaacaaatgatgcctctagtctcacgtgcttttagcnnnnnagggccattgcctcatcccgcaacaatacagcctgatgatcgtcaaccttctcaggtaaatgttcaatccatggctcnnntgattgagcactctgatccaccagaggatgtcttccgtgcaatggtcgaaaatgctgcgataagccaagacgaactagtgaacgagctttgctgtgatgaagctctttctc

SEQ ID NO: 719 - DNA, 628 bp, Arabidopsis thaliana
  misc_feature (1)...(628): n = A,T,C or G
ttttttgaaagacaaattttattctgaaatacatctgatgttataaatctctcttttgtccacaatgatagaaagaaagagatgtgatcttaacacagtaaccagaagaagaaaanaaaaaggannnnaaaagccagaacaagtatatgattacttcatctctatatggcttattccaagaaaatccaaagaaaatgtaaaaggggattgagagaagctgaccaaaaactaagtctaacagcttccagaagatgacaaatccatgattatcaggcaacgttcttgtcttgctgtttgatgatattttcatttcactattattttcancatcaagtgggatattaatttctgaactgaagataactaagatattaaccggttcagttaaccgattccttgcattctataaatctgacgcaccatatttcttctcataccacaattactaattaaccaactcaaatcttggaactcaagaaacaacaatgtcggagatggccggagattcttcaacatcagaagataaaatccataaaccaaaccgcgagaggaatgtctccgacgaacttgacgtcttcgaagccactcgatatttttccgacttcaacgaaccaacgacgatcgagta

SEQ ID NO: 720 - DNA, 628 bp, Arabidopsis thaliana
  misc_feature (1)...(628): n = A,T,C or G
ccacgcgtccgctcgcagtacatattgaagcggtggacaaaagatgcaaaaagccggcatttttcaggagaacctcagcagttgcagactaggctgctgcggtataacgatttgtgcgaacgagcattaaagctgaatgaagaggcatccctctctcaagagagttacaatattgcattccttgctattgaaggagctataggaaactgtgctggtattaatacttccggcagaagtcttccagatgttgtaacgtcaccaactcaaggtctgatttctgtggaggaggacaaccatagcagaagtgcaggcaaaaccagcaagaaaaagaatccaactaagaaaagaaaagtgaacccagagcaggatgttatgccagttgcagcgccagaaagcttgcaacagatggataagctgagcccaaggacggttggcattgaaagctattatggaacacagcagagcgtacaaggaatggtccagctgaacttaatggggccaactcgcgataatttctatgggaatcaacaaacaatgcaannattgcgacagttgaactcgatagcaccaagctacgacagttactacggtcctcagcaaggcatccatggacagggagtagatttct

SEQ ID NO: 721 - DNA, 628 bp, Arabidopsis thaliana
ttacaaatgtttcggtattctataaactctgaaagccaaaccgcgctcccgaatccaagcgaagggcttccatattctttttttggaaaataaaaattgcatgtgcaatggtcttcacacattccagatattaacacaaagtattgaagcacgaaataaaataaggatagattgaaaagaaaaaaatagaaaacacaccactatcaatgcgcaacccaaaaccctatcagaccagattctctacaacatcctacggtcatcatcacaccctcacactcgccctttcccttcttattcgatgcattggtccaatcaatgccttggtccaacgttgctgccacaatgtctcctgacatttgtgttcatgttttggggctaattgtatatttttaccggcttctcgtaagcatggcggttctggtttgcagcataagccctcttaggagtagtgtcagcatgctccaacccgaggtactgctcaaaagcaccatagacatctcttctctggaagcgattataaacaacatctgtgtcctgcaagtactctggacgccccattgacatgaacgcaaacttccacttggcaaaatcttcatcagatacatgaagcttcttttcggacgcgtgg

SEQ ID NO: 722 - DNA, 628 bp, Arabidopsis thaliana
acccaaaagcaactatctcctttttcttcctaaaaaagcagagcaatctttttttgaggtttgtttgcaagtgaagatgttcagatctaagtcatgcagagaagagaccagaagtagcagcatcaccaacaagtaccattgcttcagtcatggagaaaaatcagaatcagaaccaacaaaccagcagccaccagtgatgatgagatcttacagtacatcaacttataatgcataccagaatccaacaattgtgagagacgactccaacaataaatcgaagagaagcaataaggtgaagaagaaaggatttaagggtttgtgtgaggcagagattcagaggaagaagagagtggcttcttataatgtgtatggtgttgaagggagagtgaaaggatctatgaagaaaagcttcaaatggttcaaggagacttgttcaaacgctgtctatggtttgtggtgatccaaccacaaatcttcccaatcttcttctcttgtttcccccattgaacttgtctgtttttattcttgttctaagtagggtacccttctaagtatgatgattgctgtaacaacttaagctacgataaatacgatttagcatttacaataaaaaaaaaaaaaaaaaaag

SEQ ID NO: 723 - DNA, 628 bp, Arabidopsis thaliana
aaaaatggcactaagaatgtgggcttcttctacagcaaacgctctcaagctttcttcttctgtttccaagtctcatctctctcctttctccttctctagatgcttctccacagttttggagggtttgaagtatgcaaattcacatgagtgggttaaacatgaaggctctgttgccaccattggcatcactgcccatgctcaggaccatttaggtgaagtggtgtttgttgaactgccagaggacaatacttcagtgagcaaagagaaaagctttggagcagtggagagtgtgaaggcaacaagtgagatcttatcaccaatctcaggtgaaatcattgaggttaacaagaagctcacagaatcacctggcttgatcaactcaagcccctatgaagatggttggatgatcaaagtgaaaccaagtagccccgcggagttggaatctttgatgggtccaaaggaatacaccaagttctgcgaggaggaagatgctgctcactaggagggtttctctctgtcttttatgttccaagttctatcaattctcatgcttgttttctaaatttgcatacactctatgaccaacttcacaaaataagagttcaagaagatgaaacagagacctaac

SEQ ID NO: 724 - DNA, 628 bp, Arabidopsis thaliana
  misc_feature (1)...(628): n = A,T,C or G
gagcggccgcccgggcaggtacttctcacacacaaaaagaagagaaaaggaaaatccaaaatttttaattttttcaatatcaattttgttnnntgggcacccaaaggaaaatcaatcaattatgtggtttcttaagtcttttggtcagagggtttcatacatggaataagactctcaccattaaaacctaatcatcccctttaccttcgcttccttctttctccttcacacctccctctttctcgcttgcttgctgtctttccaatctgcgattcctaaattcactgaacggatccgatgaagaagactaatttcgtttcctctgcttccggtggcgatcccatgatcagattaacctttgtgcaggttctggagttggaaaaggaattagagataaagagaaagagattggagatgattaaacaaaagagattgaccctcaagtcagaagttaggttcttgagacgtagatacgagcacttgaagcaagatcaaactcttgaaacctctccagagatgttgagattgtcagaatccgggggtttagaggtcccaaggaaaccaagtggcgaaagaaagaagcagtctggtgtgagagcatctgtaccatgttttgatttgaaactga

SEQ ID NO: 725 - DNA, 628 bp, Arabidopsis thaliana
gggaacttgaatggcttccttatccacttccgttgtagcttcggcttcgtcgcgtttatggaatcctgctgcctccaacggcaagatttgcgttccttctgcttcgctttctctgcgtacgggttgtagacggagttcgtcctctctcacttcttccgcttcttcgcaattgcttcattgctcgtttctctcgtcgcctgtttccctagcgtctccattttctggtttgtccattgcgtttgatctcagcagtcaaactagtggactgaatggccagagacgcagaggccttgtggttagagctggaaaagctgctctgtgtcaaactaagagaagcagatcaagaaaatctctagctaggactcatggtttccgtagaaggatgaggaccactagcggtagagcaaccataaagcgtcgacgtgccaagggacgttggaacctctgtcccaagtccaaccctagcagcggcaaacgggcttgaagtttgtttctctcttcactctatctgtaatcttgtttcatgtgctttttttccaccagaagatacaatgagaaacatggttcgttgagctcttttctgcgttttaactctcttgcatccttgattcgtttataaatcaatgtt

SEQ ID NO: 726 - DNA, 627 bp, Arabidopsis thaliana
cattacatgagaatgagtagcatttcacaataatatatagaggtgacaatctctggttttatttatgaacaagaaagagattgtgagtttgtagtttttaggatattattaatatataggtttgaggaatacgcatgcatgagaatatgagatgacctcacgctcaatccttttttcctttgcccttctttcctttgcccttcttcttctcagaggaacccttcacccttgatgcggaagctaccttaccctttgcacgtgcagcagcagctttgcgagtcactgcagctgcagcctcacctgtagcggcagaagcacttgcagaagaaactcttgccttgcgacccttggcaatgacttgtccgatggtacttgtgtagccactttcggatgcactggcccctggacctttgggattgttgaaagcactagcagagctagagacactgctggcgctgtaagtaagaccagcagcagaaagctgagctccaatgcctttgttagtagattttggaagagaggtgcctaatttggtctctttggacacttcttcgacctgccttgcggtgacaatggcacacaaaatgccaatcacgagaagcacaacaaactttgtggcattcatct

SEQ ID NO: 727 - DNA, 627 bp, Arabidopsis thaliana
tttgacataaacaaacccaatttaaaaaaaaaaccaacttattaatgtaacattaaaaaaaaaaaaaaaattagacccaaaaaaagtcctgagctctctgctatttcttcttttttccttttcttttcagacgaacatagaaatatttctacttccaaatctttacggatttgtcatgacttgcagacgcaaccactcccgtcgaaggcgactgagccaaggcagagatcacacactcgtggcctgctaccgtcatacatttgttctccattgtgttccacagctctatagcctgatagccaccgatgaccaagagatcgggatagctagggtgaaaaacaacagagtggaacttgtttccactgttgctaagctcgtggatgcaatctcctgaactcagtgaccataattttacagcgtcttcactaacagacgccaccaactctccgtttgggctccaacaaacagaatgtacatttgaggaatgtcccttaaaaatgttgacccgtttgttattattttcaatatcaaaaattgacacagtattttctgacgctgcagctaaaaactgtcctgttcttggctggaaacgtacttgcgtgctagccccctttacagcacgaacgc

SEQ ID NO: 728 - DNA, 627 bp, Arabidopsis thaliana
  misc_feature (1)...(627): n = A,T,C or G
gtctcttatttggatttttattactaatccaatggtgacgaagcatacaacacaagaatcttttcttttcttatcaacacaagaatcttttcttttcttttgtaacatcaacacaagaatctttcattttattttatttgattctacttttccatactaatggttgggtcatcaataaatccattcctcggggagaagtttctccggcgaatcaataggattttctgcttcaatcttgatagnnnttgttgccaacatttcgctcttcttcttcgaatcattttctctaatttctggacgaggagaaatatggataccgttgttgtgaatgttaagattgagtgcttgaactacacgagtcgggagaagcaccggtgagcaagctgtttttttggtgggtggatgagaagccgtggctggaagaaaaactccggtgccagaagttgtacggcccggtgtaaccaagaaaaatgcttgcatacgatcctctcctttactcctttgccaattgctttggtgcttttgtcttgtattatagttcaaaggaaatgtttgtctaagaggaggtgccccgggccgacgaaattcaccgttgccgtggtgatggtggttcttgacatatttctg

SEQ ID NO: 729 - DNA, 627 bp, Arabidopsis thaliana
tttttttttttttttgacttcttcttatttagataacaaaactcaaataattcttgtgaagtttacacttttttttttcttgtttcttcatagagtaagtaaaaaaggaagtagataatacaacacacgataaagaaacctatacaaacatttttagagtaaccccacaagatgattgatccatcaccagtcgtctgctcctttagatacacccagaatcacagcgattgttgctagaatagcagcgatagtgcaggcaatgtatcctggtttctccctgtaatcgattctccttccaaacatcatgatgaacaatccgacataccaagggattgctccaaggaaaaatccaacaatgaacaggaaccatccaagaccaattccacagcaaggaaggcgacgttgtctgacaggtcttccttcagcaacaccaccatggactggaacagtttgatatccatgagcgtaataaggagctccagaatcgtaaacgccaggtggcgcagaaggttaaggaaacccagtgaccggagcagaattctgcggcggagggtaattggaaacaccttgaaaggtaccgtattgatgatgctggttaccttcttccgaagcaaatcctttgctttt

SEQ ID NO: 730 - DNA, 627 bp, Arabidopsis thaliana
caataactcaaacacaaactatactaaacaacaaaaagactcataaattccgaaaatatcacatttttttttttccgattgttgaagaaacttaagcaatggagactttagcaccagcttcttcaagagtcttcttagcttcttcagcttcatctttagtgataccttctttaaacttctttggtaatccttcgattagctccttagcttccttcaacgccaagctagtcaaagccctaacagctttaattactgcaatacgagaactactcggaacttcattgataaccacatcgaactctgtttgctcctccactacagccgccgcgccaccgtcggctggagctgcaacggccgctgctgcgggggctaaggagagtggggagacaccgaatttgtcttggagatagtcgacgaggatacgagcttcttcgagggttaaggaggagatttcggatccgattttctcgattttctccggagcttcgacggcggagataggacggaggttgattgcacggtggctagaagaagagctgagacgaaatgggaattcgattgcggtgggtttggaaaggaagtgatgagtggaagcggaagtgagaggagaagaggaacggattgttg

SEQ ID NO: 731 - DNA, 627 bp, Arabidopsis thaliana
taatacacaccaccgtgttcattctggttaagaaaaacagtcatgatgtcatatataaatacaaaagacctaaaaagtatttgacattttttcatccttttaaggcaattaaagaaaaacaaacccaaagctctttgcagtcactcatctgttgaatgagcctgatgagcggttactaccaccgggattcacataatctcgctttgtaaacaatctgaatcttggaaggcatcttcctagcatcaccttccagctccttttgcgtgcaattcgatcacttatcaactccaaagtagagatgattactctaaatgttggtctttttgatgcttctttgtcccaacaatcctggattagctcttgtaacccgaaaggatatgattttgttggagcattgaatggtggacgttcatcttcaatatatgctttaggaacttcgcggtcttctatctcatgaaatggttcacaaccttctatcatctcttgtaagattaaagcgaaagagaatacatctacttttgtatcatactcttcattcctataaacctctggagccatatatcgccatgaactgtccaagcatgtaacaacaggtctgtcttttttaactgtcttcttaactaccag

SEQ ID NO: 732 - DNA, 626 bp, Arabidopsis thaliana
tttttttttttttttttttttttttttaccatatttaaattgtttttattagttagatggtgtgaataaatatgattgtttacattttgagccttttgatttaggacttttgctcagtaaaatgatgattgggatctgaaatatcaatggcatgtcttccagttgaactgaggtgactaggacggctaagcttttcagtcttgtgaatatcctctaccaaatgaatgtcctcttcaagcattaccactctcgtttgttcgccatggggtccttgcactatggtttcttggactttgaggtgttcatcaaactcgataatctcagcctttgtagaagactttcttcttttcttgagatagcagaagagagcagcagcgaggaatgcaagaaaaaacaaacttccaagagagataacaaccacaatgataacatgatgccccggtgctggtgttggtggtggtggtggaagaacgtgaggtggaggcggtggctgatggggatgaggatatggtgatggtggtggcggatgaggatgaggatatggtgatggcggtggctgatgaggaggagaaaaatgtggtggtggtgggtgatgaggaggagaaaatggaggtggtggaggggaa

SEQ ID NO: 733 - DNA, 626 bp, Arabidopsis thaliana
ctttttttttttttttttaacagccattggtaactttgactaaaagagtgtgataccacaaattccatcacaagaacagagaaatttaacagattcttaaaacatgtgtaaaacggtgtacaatgaaagcaaattaagtagaggttattctgacctcacagattatgtaacctcccgaccaaatcagttgagcttcattgatgcaaatgatgaagccatatccaaagccgcctgcacttgagaagcatccgttccctgccctgatgcaagaccacctttccctttcccgcaccttccttttagaggacccaatgcagttgtcaaccattcagtgacgtctaacggcttaaactggtctgatttttctggcactcctgcacacacaaccgccttgtttgtgctttcatctgtgctgaacaccattatcgacatacccttcttttccatgacttttgaaacggcctctcgcacagctgctgcatcaagacccacatccagctggattatgcagaaagtcttcccatctgatgctgcggactcagctgcctctgttgctaatttgacagattttttcaggttttgttccgctattttcttctgagcttttcttacttcattctgaagcg

SEQ ID NO: 734 - DNA, 626 bp, Arabidopsis thaliana
  misc_feature (1)...(626): n = A,T,C or G
gccattcattcaacatcttttccaaaccaatcctgacatcgttgttaccgnntaanttccgnnnacagattctctcggttctgncaccctcgcaatctggagaaagcaatgcagaaacaacactgggatgggggaagggaaagaatgaagcatctgaccatgaatcatgcctaaaatttgagatcaaaacagtagaaagtatcttcaagaatagatgagagcatctatctatcttttccatctttctcgtatagtataacaacatttcttcaactcctgctaaacagtgtttcttccaagagtttgatctacttgatacaatggcaacatcgaagactgaaccttgttttcaccaataaactcggcatcgccacgaaccgcgacacaatctcttggtgtctcgaacaaagacaaagagtattgcttgcgaagaacaccaacgtcgaagaatataagaccagagctaggcacgtcgactcggattcctttcacctgtaaccacaagaacagctcttgcgctgagattcccgataaatccctgatttgagcataacctatcgttcccgaaacaatctcatcgtaatgcagctctgtctcatacttagcctggcatgactgattcaaat

SEQ ID NO: 735 - DNA, 626 bp, Arabidopsis thaliana
  misc_feature (1)...(626): n = A,T,C or G
gcttggttcgatgaattcattgaaaaagtagatggaaaagtgacgttcaaaccggttgatttcgatgagttagccaagaacattcaagagaagattggttcacattttgagcggtgctttggatccgaaacacatctagaacttgataaagaagtgatccttcagattctggcggcttcatggtcatcattatcatcgggcgaagaagaagggagaacaatagttgatcagtggatgcaaacagttcttgctcgaagctttgctgaagcaaaacagaagtacggttcgaatcccatgttgggcgtgaagctggttgcttcttctagcggcttagcttccggagtagaattgccggcgaaggtggatgtgatatggtgacatgcatatatataaatgaggtaataataaagagttataatcctcagattgtttttctcatggaaagttttttgcttgtgtaaattacaatgtaaaatggctaagctatcacttggtagataggtttgtttaggagtaccaatttgccacatcttttttggcattattntaggtatttctcctaaaattttccccaacttccaaatttagatgaattaaaccatcttctctgtaaaaaaaaaaaaaaa

SEQ ID NO: 736 - DNA, 626 bp, Arabidopsis thaliana
ccacgcgtccgtgttacattttcctagtacttttagttataagtttgaaatgaataacgtttttggtattataacagaaaggttacatggttcatgcgaccaagtcagccacaacgattccaaaagaacgcttaaagaaccgcatagtcttccatgatgggcgtttagcgcaacgtccaactccgttaaacgccattatcacatacctatggcttccttttggtttcatcctctccatcattcgcgtctacttcaacctccctttacctgaaagatttgtccgttacacttacgagatgctcgggatccacttaaccattcgtggtcatcgtcctccacctccttcccctggaactcttggcaacctctatgtccttaaccaccgtaccgcgcttgatcccatcatcgttgctattgctcttggacgtaagatctgttgcgtcacttacagtgtctctcgtctctcccttatgctttctcctattcctgctgttgccctcacccgtgaccgtgccaccgatgctgccaacatgagaaaacttctcgagaaaggcgacttggtgatatgtcccgaaggcacgacgtgcagagaagagtatctactgagatttagcgctctattcgca

SEQ ID NO: 737 - DNA, 626 bp, Arabidopsis thaliana
ttttttttttttttttttgagtaaataagaatgcattagagaatcaaaataaaagatcaaatccataatccaaacttcaacaaaacatcttccacaatccaaaacaggatccacatttttcaccatgggaaatgaaccctagaaactaaaaaacacgataacaaaaagctcaaaatgaattcctcacgaaatagaaaatttcttcagaacctgagcttggtaaagaaccatctgttcttaccagtcttgaacctctcctcaagcttagccttagcttccttaagagcagcaaccttcttatccttactctgaagagcatcaagagtcgccacttccttgagatccacgtcgagtgtgtaacgagtaggcatcagatgctggtaattaacaagcttgatgaaacacttaaccctagatttcttagctgtcttcttagctgagtctttgcggatgactttgctcgggtacttcttcagtccggcgacgaggcagtgtccgtaaggacgatcacggttaccgtcgtcgaaggatttgatgatgacggctttctttccggcgtaacgtccttgaagaaggatcacggccttgttctgcttcaagaacttcaccattgttgcttcgtttgg

SEQ ID NO: 738 - DNA, 626 bp, Arabidopsis thaliana
  misc_feature (1)...(626): n = A,T,C or G
ccacgcgtccgagagagggaggtaacataacagaggcatatgtttcaacaaagcacaaacttcctgaagtaaatgtggaggcatcaccactggtaatgagtttggactctcctccatatgccattcttggagaacccttcacttacgctgttagaatctgcaaccagacacagttgctgcaagaagcaaagtttggtctggctgatgcacagagttttgtcctgtctgggtctcacagcaatacggtttcagtccttcccaagtcagaacacgtcttaagttataagctagtgcctctgacttgcggtgaacagcaactcccaaagataactttgacatcagcgcgatatgctgctgagtttcagccatctgcggttgcttcaagtgtctttgtgtttccctcagccccacaagccgagaaagccatctctaccagcaagtagtgtaacttcgcatgacttgggttttcagatgtctatgcagtttcagccatatgtggttaagacagacatattgaannngtttgnagaaattttgatcctgaagtgtcgcctatgttgtattttcatttttccttctgttgttgataataatggatattttttggagaacccaaaaaaaaaaaa

SEQ ID NO: 739 - DNA, 626 bp, Arabidopsis thaliana
aacataaacactacacacaaaacactgaatacgatgttgcttggaaagagacaacgaccaccgatcaacagaaccacaagtctatcggagataaagttcgatctaaaccttcccagcgagtcagagccatcaaatcaacagaagccaaccgttgcgagcccgtacggttccaacggtcaagctgtaacagcagccgttgatcaaaaccgtgggttcttagatcaacggctcttatccatggtcacaccgagaggtaacctgaggagacactcaggcgatttctccgacgctggacatttcttgagatcttgcgcactttgtgaacgccttcttgttcctggccgcgacatctatatgtataggggagataaggctttttgtagctcagagtgcaggcaagagcaaatggcacaagatgagaggaaagagaaaggtaaatcggcggcaccggcgaaagaaccggcggtgacagctcccgcgagagcgaaacccggcaaagggagagctgcagccgccgtgtaatccccattttcatatacattttagctatatatatgtgtggtttgctatgtgtttgtatatgattatgatgggtaatacatatataaagcattaagcgttaatta

SEQ ID NO: 740 - DNA, 626 bp, Arabidopsis thaliana
aaaaatcactaattattatttattttcaccttaagaagcgcttatttaattattcgaaacaaaacacaaaatgtcacaacaatacgcccataataagaattatttttttattatcgaaaagtgcaatcaaaagggaaaaaaaaaaaaaccaaattggagagaaatcaaatcatgaaatgtgtcatcaaccgagtatggtcgtctcagcgatcatggaggtgacaacgtaaggatccatgttagaagctggccttctgtcttcgaagtaccctttaccttccttctctgtgtcacgtcccactctcactgacgctccacggttcgcgactccccaagagaatgtgttgatgtctgcggtttcgtgctttccagtgagacgacgctcgtttccttcaccgtaagcagcaatgtgttctttgtgtttcagctgaagcttccctatcgctttcttgatcacttctaatcctccatcgtttctcattgtcttagtgctgtagttgcagtgagctccagctccattccagtcacccgggactggtttcgggtcgaagctgacaattacaccagagatctcagtgatcctctcgagaaggtatcgagcaacccagacttgatcaccagaacta

SEQ ID NO: 741 - DNA, 625 bp, Arabidopsis thaliana
tttttttttttgtaaatattttcgattcggttttctaatgaatttagtatgctgttacttcagaaacaaaggaattgaatcgtattgtgtattggtaatagaatcaacaaaactgttccttgaaattgaaatttgatatttacatttgataaacttccaggtcttcaacaaagacttacttcaggcgaggcttcttagtcgccatcggactcatcacttcgtcgtccggcgaaaatccctgcaccggtataatattaaggtcaaatccacggtggctactactgctgacgtggctagtagaccccacaccttccgagttcgaaacgccaccatcgtagtggcaccgcttgtggccgccgagagcttgaccggtggcgaaagatttcccgcaaaccgaacaaacgtgagatttcacggcggtggatggtgtcgatttatcattctctccaccaccgtataagctccggtggctcgctttatgaccgccgagagcttggtaagacgaaaacgtcttgtaacaaacgccacacttataactcggcttctccgcaaccgtcacagagtcaagatcgccgccatcccgagcaagaagcatgagacagaaagctagatactcttcctcagt

SEQ ID NO: 742 - DNA, 625 bp, Arabidopsis thaliana
ctagaaactactaattctcgttgtaaatgaataataacaatcacacactagtaacctgaaatgtaaataaattaccaaattattccattattgtgacttaccataactctcgtacttccgggtgttcataaactcggtcaagtatgaagaattaaagcctttgatctttttgtactctttccaccacttcatgaaactgctttcctctaagaatatctccggcgaaacctcacgttttgtgattatctcccacacgtatccctcaaactccacgagttttctagtcaatacctctctcacatcgtctctcatccccacagttgtattcaactgattaattacaatcaacgaatcctcaacttcagcccaaaaacaagaatcaaacgtcaaaagatcactcaaatctctctttttgcatctttccttttctattaatatcgattccattccaaaccatttctcaagcataacatagtggtgagaccttcccgtagttcgatactctttccgaccctcgaggtaatattcagcaatatcgagtggttcgatcatccgtctgtaattgttccccgagaatagaaaccgtctcttgagaatcgatgcatcgctctgcggcctcctctct

SEQ ID NO: 743 - DNA, 625 bp, Arabidopsis thaliana
ccacgcgtccgcagagttctgatttacatgacctatgcggatgggaaaaccacaatgtcggtttatgagagaaaaacaagtattaaagatttctatgctgtgatatttccgtcgttgttacaactagaaagaggtatcacagacctggatgatcgtaaacagaaagaagtctgcaaaatacggtacagaaataaagatgagactgaaaaggtcaagctctcggagattgacatcgagagagaagaagaatgcgggatttgtatggagatgaacaacatggtggttctccctaattgtacgcattctttatgcatcaagtgttaccgcgattggcacgggaggtcagaatcatgccctttttgccgagacagtcttaagagagtaaactcaggggacttatggatgttaatggagaaatccgatacggttaatatgtatacaattgagcgggagaataagaagaggttgtttgtgtatatagagaagctacctctagtggttccagatcaagtgtttgcttcttctccttatgattgccatgtcaagtaaataagacggagaagagctttggcaaaagccgaaaccgggtctggtaaacttttatctgaatgtatatgtatataat

SEQ ID NO: 744 - DNA, 625 bp, Arabidopsis thaliana
  misc_feature (1)...(625): n = A,T,C or G
aaaccatacaagattttttcttggtaaattatatttgctaggaggaacactttaacttggctatataatcaacaattacaaaattcagacaaaaacgcactcatataacaactacctttctctctgtttaagcttccgagtctcctctatccatttggaactcttcaagttcatggtgtttctcactataccatttttgctcaatccaatgaaatccaaaattttggatcaaaagaaccaaatgaattcttccaaaactaaaggagaagaagcaatccatggctgtgcccgggatatacagaatggcaacaagggtcacgactgagcaagccatccatgcattagagaagcttgcttgtccttcttttcgacggtcctcctgggaacatcttcatgatccatcctagaaccctttctaccacctcatcgccttcatctgcaatcggtgttctctcttgaacaacatgagtgtccggctgctgcttttctggtgaaacattgtctatggccatcttctgcgctgttacaagctctaacctttgcgtctgcgcnncnngttttctggataactctttgttcagctcctgcacatgcgcacttcgagataactcagatgacagtgctt

SEQ ID NO: 745 - DNA, 625 bp, Arabidopsis thaliana
  misc_feature (1)...(625): n = A,T,C or G
ttttgattcttaaggcagacaagtatgaaataaagacaacaagacattgtagcttgggagaacatattgctgtgaagagtttacaaaataaaaataaagaccaaaactatgacagaaataacaagcaaaatgcttctttttttttgtaaccctatataaagataaacgtatcatcagttaaagaatgccgagaaagacagaaacacatcgatccgaggttacctcttctccctattttttcctctttccggtttgtttgttttcatcgttctctctttagagaccaaaattgcacatctgcacaaactccatttcgttatcaacatatttagtccagagagacttgtattggttcatcgcaatgtctagccacggtttcatgtttccattgtaatgaatcactcctgcatttctgatttcgtccatgctcactcccgggttatagcctaacccaagtacatgccatgatttgtccaatgatttcgtctttgaatagaatgtgatcaatcccggaggtagagttcccaatttccagagagttcngtcttcattcaggttctgccagtaatggtattgatcggtgcacttctcgcgtctccaggcattgagatcgaatatgttcatt

SEQ ID NO: 746 - DNA, 625 bp, Arabidopsis thaliana
cttttttttttttttttttactccatagataaaaccaaagtcttgaaaattgagaatacgggagaacgatagtcattcataaaacaaagggtacaagtttggataaggcttataaagcaggagaagaacctaaaatcttcctcggcctctaaagcttccacgagagccaccgcgtggtggaaatctaccacctcttggagcacctctacctctactaaatgatccacctcttccacgacctctactatcacctcttccacgacctgcacctccacgtccacccgttgactgaccctttggctgaggaaggaatcgagcgagtggcaaaagcttgtaagggtcgatgaagaacttatctcctggagaatacgaggtggctacaataccttccatcattttgatagaaaacaaagattcattaattgggccaaagatttcatctactttcccaatctgagtcttgttctctaggtagatcggagcgttaaaatgaggaatcttctcctgtgagagtttggtcacagcatctccctcgcaagcatgaacgaaagttgcaacctccacgacttcgctaggaggaccttcgtctctaaaaccaccaaagcgaccgcctccggacgcgtgg

SEQ ID NO: 747 - DNA, 625 bp, Arabidopsis thaliana
agacaagaacaacaagaggagttgtgagtgtatatatcagacacaagcagagagaaagatttgttctttttaagacctaagcaaggaaaccaagcctctctccattcttcttagcaagcctgataagcccttgtctctgttttgcatctgctccaatcgatttgcaaaactcagtgatcacctgagagtgtaaggcaatggcttttcctctgagctgattaaacctcttcttgcctactaggttgcgtgtgacaacaactagaggtgcaaataagcctttgccttcattgacattcttcatcattggaactgctctgattgctttccttgagactctggcttgttgcggaggcgcaactgtcttggagagcatggtttggtaatcttctccggagatggaacttccccatcctccatagaaggaagttcctagcaaagtttgattacatcctattgcagaaatcgaagcagcagccataatcaatcagcttctccctctctctctcggtctttctgatcgatgttaatggtagagaggaagagaaattgtgtgtgtgtggttggattttgagtttaacattttggtgtggacaaggtttgggtgttgtttttgtttggatggaga

SEQ ID NO: 748 - DNA, 625 bp, Arabidopsis thaliana
actaaatcaagtctattgagcactgcaaactgtgtctctttagtgaagttgtcatattgaaaaacttgatcttgaatcggagaacacagaaccaaattatatgtttcttcaggtcactggaaaaacatataatttacattggcttaaagatgtttcagatcaggaagtgaagaacttggtcgtggcttttgcttcatcagggactactctgttctcaattgctaacttagaagccgtaacctgaattgtccatagggttaccagcaggagctgctgattcaggctccttgatctccacaacaacacaatcagacatcaagaatgtctttgccacagatgaagcatgctctaggcaacatctcacaactttggttggatcaatgattcctgcagccatgagatcttcgtatttgccagttgcagcattgtagccatgtttagggttgtcactagaaagaaccttctcactgacaacgctgccattgacaccagcgttcttggcgattaacttcagtgggtagctcaatgctttcttaacaatgtcagctccaaccttttcttcatcgttcgctagagtctctttaatagcgtccactttcgatgcaagtcttagcagagtacatcc

SEQ ID NO: 749 - DNA, 625 bp, Arabidopsis thaliana
tttttttttttaagaaaaacctagatatgaaattcaaacaagttcaacataagatccacaacatccaaaaacaacttccaaattccaaaaaaaaagcagtattcaattcaaaatgatagagatcgagatgaaaatcattcctgagctccttctttctggtaaacgtaggtgagaccacacttaccacagtagtgacgatcgaaatgactcgccatgaaagtcccagcaccacaggttgcgttagggcactccttcctcaaacgctgaaccttacctgaaccatcaaccttgtagaactgaagaacagcgagcttgaccttcttgtgcttgtgcttgatcttcttaggcttggtgtaggtcttcttcttcctcttcttagcacctccacggagacgaaggacaaggtgaagcgttgattccttctggatgttgtaatcggctaaggtacgtccgtcttcgagctgctttccggcgaaaatcaatcgctgctggtccggtgggattccttccttgtcttggatcttggccttgacattgtcgatggtgtcagaggactcgacctcgagagtgatcgtcttccccgttagggttttcacgaagatctgcatctttttcggacgcgtgg

SEQ ID NO: 750 - DNA, 625 bp, Arabidopsis thaliana
  misc_feature (1)...(625): n = A,T,C or G
ctttttttttttttttgttattcaatttaaagtaattagagtgtgaaaccatagtacatcaactgaaataatgaaaccaacctctctaatcatcttattttccaatgttttggttttcaaacttctcaaagatgcgagggaaactaaagaagacgatacttttaataaacataaaaagccttcttgttcttcttcttacattgcagattggaagatcatctcagcgagttcctgtttagcagaagaaacctttggttctccaaactctttagctttcttctcaagatactcaaaatcagcttttccttcttctatttgcttcccaagctcagagtcccaagttgcatatcgcttgcgtaccaattcacttagacttccctcctccaagatcttgactgcgtttctcagtccacgagccattgtatccattccactaatatgagcaatgaataagtcttccacgtctgtactctctcttcgcagtttagcgtcaaagttgaagccgcctggagcaatcccannatttttgatgacactcatcataaccatggttgcttctccaacatctgtaagaaactgatctgtatcccatccagtttgagcatcgccagtgtttgcatcaatg

SEQ ID NO: 751 - DNA, 625 bp, Arabidopsis thaliana
tttttttttttttttttttttttttatacaaacactagaagtcttataaattcaaagtatgtctgagttttacaacattagagagaaagagaacaacacagaaacatttatagaaacatgattacacatgcgctaacaactttaagatttactgagccaaagcacttgtgttgtacacaagaagagcacctccggcaagaattccggcgagagttaccgcccaaattgccaatccggtgactcctcccttgtacacgtcaccactcgctgaccactcgttctcgttgtaaataggactgtatccatcgacgttagctccatacttgtcgacgtacttgtaaacaccgtatcccttgccctttctgccggaggcgtcgacgccgtccctcaagtccatgctgccgttaattccgaagggcttgtcggtcttgatcttcttgacgccactggcgacaattttgaaggagggacgagctcttgtgagcgacggtaatcctctagccgccgtcttctccaccgtgaaaccagctggtttcaatgtcaccgaagatagcatcactgaagcagccattatttttctcacaagatgatcaaactattcttacctgcccgggcggccgctcga

SEQ ID NO: 752 - DNA, 625 bp, Arabidopsis thaliana
agcaaaaaaaaaaaattaaacttgatgtgattcaaaaggaaccgagatcaaatttggaagatagacacagtaagaaaactgaaaaatcccagaattgatctgaatcttcttgaacatatctcccctcaccatatagatgcaagtagctccagttttgtaatcgccacaacacatgattatggtcttgtcaaagatgaagtaactactgcgacaataagtatcatctagattaggcaagttggttgtcggcaatgtcataaactttatccacaccacttcctcctctctatcaatcttcatctttgttacccaaatctcaatcttcgttgtttcgaagcattgctttaacaatgaaaaccgatcttccttaaaaaccgccaggacaagttcattgctaccaaagtccttccgacacggcagtagacaaaagggtttgaaaatctccatggagaaatcaaaggtttcgatgaaatactcaagagtctcagggtggttatgagcaagccaataaagattcccgttcacggacaaaggatccttgttgggccacaggttgaaagggttaggggtatcaataaatttgaacgcctgcgatgcacactcgtagatcgcagcttggtagtaa

SEQ ID NO: 753 - DNA, 624 bp, Arabidopsis thaliana
  misc_feature (1)...(624): n = A,T,C or G
ccacgcgtccgacatcagatcagaagattttggtttcaagctcttcttctacgattccccgaagcttctggattgagatctctctctcaagcaatggcnnntacaagtgagaaacagaacaccacaaagcctcctccttctccttctcctctccgcaattccaagttttgtcagcccaatatgaggatcttgatctctggaggagctggcttcattggttctcacttggttgataagcttatggaaaatgagaagaatgaggtggttgttgctgataactatttcactggctcaaaagaaaacctcaagaagtggatcggtcaccccaggtttgaacttattcgtcacgatgttaccgagcctttgttgatcgaggttgatcggatttaccatcttgcttgtcctgcctctcctatcttctacaaatacaaccctgttaagacaatcaagaccaatgtgattggtacactcaacatgctcggtcttgccaagcgtgttggagcaagaattttactaacctcaacctctgaagtgtatggagatcctctcatccaccctcaaccagagagctactggggaaatgtcaaccctattggggttcggagttgctatgacgaaggcaag

SEQ ID NO: 754 - DNA, 624 bp, Arabidopsis thaliana
aaacgaagagtaatatataccaaactatataactcgattcaatttcattcttgtttttttgttttgttgattaggaaatcgattaagctacagaagaacattcccttgcaaagtgaccttccttaccacacttgtagcacgcattatcattacctcctccaccgcttcctctctggtcacaatcacgagccaagtgaccagaaccaccacactggtaacacccacgagaaggctgtctcttagtcgcacaatctcttgcaatgtgaccaactccaccgcatgaataacaagttccactaccaccaccaccgcttctgacgtttccggcagcaaccttctgagtacaatccctagcaaagtgaccaacatcaccacaagtgtagcaaccatcgtttccacctttgaccgctccacgttggtctccgtttccaactgatttctgagtacaatccctagccacgtgaccaacatcaccgcaagtgtagcaaccatcgtttccacctttggtggctccacgttggtcaccgtttccagctgaagtacaatccctagcgaagtgaccagtatcaccacaattgtaacaaccttctcctcctctagatctacgttcacccggacgcgtgg

SEQ ID NO: 755 - DNA, 624 bp, Arabidopsis thaliana
aatcatgcgtttaaaggcttgtagagcttctcaaccatcttcctgtactcttcttgattgctccaaagctgagccgcttgattgttcaatggtgagctgatgttcggttctccgagaaggctttgaattgagagtaatatcgtcctcacatcataagcagatgaccatttatcctgaagaatgtccaagcaaatattgccatagagatccacattggggtggaagcagcatgtctcaaacttaactttgggagacttaaaaggataatcgttagagaaagtgagtgagagtctgtactcagttccttcgaacacagtatctttgcttcctgtaattgttcctttccagcaaaatatgttgtcttcctctggaaacgcagatatccccggatcagctcccatcatcaatcccattagttcagattgcagcctttttagaacggagtggctatcgacggtcttagtcggaggagcagattgctttgatccggtggctgccggtgtagtcgccgccggagtattccctgtgtacccattaaccgtcgccatcctttttcgcctcttctaattgaacaaagcaacaatcgtagtcgaaatttctgaaattgaaacgcttttttctcga

SEQ ID NO: 756 - DNA, 624 bp, Arabidopsis thaliana
cgagatcaataaattccggcttggagtcggactgttcctaccggctatgtccggttctctgtctcgctcttagcgagattcgatctctattctatctatacatcttcaccgtatttctttgtttatcttccaatttctctctgtttccccaattgatcgaggagtaatatcttcatcactctccttttgctcaaatcgtgtgagcaaagatggatcttagctacaccaaattgggtgtaactggtggtggagcttccccggattggtgttaccaagagaattttgaagcaactttatagaatcgaaccaaaagaatttcggtgctatctatcttttggattggagatcggcggaagggaaaaggatttacatcgttctaggacagatcgacggtggttagtcagaatacggcgatgtccggcaacgttaacggtgatgcttgaggagtggacgcgtgggctggagcaatatacgtcttctacacgtgtctaatactaaagcatatgtgcaacttttgtttatcttatgtttttagtgggctgttaactttgttgtaatcctctggacttaatcccttctgtaattgccaattgggcctttgaatgaaaatgaattgccgacaaa

SEQ ID NO: 757 - DNA, 624 bp, Arabidopsis thaliana
tcaacttcagaggtgaaaaatgagtcgtggtaacgcagcagcagctaagggaaagaagaagggagtttccttcactatcgattgttctaaacctgtggatgataagattatggagattgcttctttagagaagtttcttcaggagaggattaaggttggtggtaaagctggtgctcttggtgattctgtttctatcactcgtgagaagagcaagatcactgtcactgctgatggtcaattctccaagaggtatcttaagtacttgacaaagaagtacttgaagaagcacaacgtgagggattggcttagagtgattgcggcgaacaaggaccgtaacctctatgagttgaggtacttcaacattgccgagaacgaagctgaggaagaagattaaaaccggttttggtctagtgctatatcctctgttcctctatttctgttggtttggttttgattcttcagttttgtgttagatattattatgtagtttgattgaagtaatactctttgcttttgttgttgcgtacttgagattttctatggagtctatttcttccaaacagtaatgatgtgaaattggactaatatgatttagggtttgattaagttaaaaaaaaaaaaaaa

SEQ ID NO: 758 - DNA, 624 bp, Arabidopsis thaliana
tttttttataaatatttctttgtactttaaaggcttaagagttaagaatatcttagaatgaacaatttttactttttaacacaagatccgattagttacttgaaagtttccaaaccttcttcaggatcttcttcgtaacccggcagagcctgaccttcgttttcctcgctttctcttcctgttggaaaacctagaagccatcacagcattagactttggcttctctcttgaaacccgacgcctctttgggttactctcttccttcgtaatgatttcacgattgcgcggtgttcttttccttacaggtcttgatggaccttcctcaattgaagcttgttctgtcttcactagattcttatcgggaataatagatttcccttcccttcgctttgatgctagaatctcagacagtaaaatatctgttgtctcgtcgtcttcaggtgagacgtgatgagatgaaactgaagcagatttcaccggtttttcttcagagatgatcgatttctcatcttcgtttttgatagccagcaggggcttttgttgttctgagctggtgtatacatcagcagctccaagtggattcactgtgttagccagagggaatatacttggattttcactcaa

SEQ ID NO: 759 - DNA, 624 bp, Arabidopsis thaliana
  misc_feature (1)...(624): n = A,T,C or G
atgccggcgggacacggagtgagggcgagaacaagagatctgttcgcgagaccattcaggaagaagggttatattccactctccacttacctcagaaccttcaaggtcggcgattacgtcgatgtcaaggttaatggagctatccacaagggtatgcctcataagttctaccatggtcgtactggtcgcatctggaatgtcactaaacgtgccgttggtgttgaagtcaacaaacagattgggaacagaatcataaggaagaggatacatgtgcgtgtggagcatgtgcaacagtcaaggtgtgctgaggagtttaaactcagaaagaaacagaacgatgtgcttaaggctgatgctaaagccagaggtgagactatcagcaccaagagacagcctaaaggtcctaaaccgggtttcatggttgaaggtatgacattggagactgtcactcccattccttacgatgttgtcaacgatctcaagggtggttattgagttgtttccattttattatcattctctactcagaatttttgcacttgctttnntaattatgtttttgtatcaaacaagactgatttatatacgatatgagttcagattttgttaggaaaaaaaaaaaaa

SEQ ID NO: 760 - DNA, 624 bp, Arabidopsis thaliana
cgaaagtcaaggattggggagctgtaagaagaatgtcactaatgatgaatgaaattgaagagataacatgcgagtccaattgttctgagcttacaactctgtttctacagtataatcaattgaagaatctatcaggtgaattcattcggtatatgcaaaagctagttgttttggatctttcagataatcctgacttcaatgaacttccagagcagatatcggggctggtctcgttgcagtttcttgacttgtcgtttacaagaatagagcaactgcctgttggtctgaaagagttgaaaaagctaactttcctggatttgacttatactgatcgactttgtagtatcagtgggatatcaaggttgttgagtttaagattgttgagtctgctatggtctaatgttcatggagatgctagcgtattgaaggagctgcagcaattgcagaatctacaagatctagccataactgtgtccgcggagttaattagtttggatcaaaggttggcgaagttgatctctaatctgcgtattgaggggtttcttcaaaagccattcgatttatcattcctggcgagtatggagaatcttaatgagctatgggtggaaaatagttatttctcgg

SEQ ID NO: 761 - DNA, 624 bp, Arabidopsis thaliana
taagaaaatggaggagaagaaatctgaagagccacaagcgaaatcagaagataagaaaccagaagaagagaaaaagaaagaacctcaagagattgtgcttaagatttttatgcattgtgaaggttgtgctaaaaaaatccatagatgtcttaaaggctttgaaggagtggaggatgtaactactgattgtaagactagtaaagttgtggtgaaaggagagaaggcagatccattaaaagtgttgcaaagattgcagaggaagagccatcgtcaagtggagcttatctcaccgattccggagcctaaaccggtttctgatgaaccggagaaaaaggagaaggagaaacctaaacctgaggagaaaaaagaagaggtagtgacagtggtgctgagagttcacatgcattgtgaagcatgtgccatggagattcaaaagaggatcatgagaatgaaaggagtggagtctgtggaaccagattttaaagcatcacaagtgagcgtgaaaggagtttttacgccggaaaagctagttgagttcatttacaagagaatcgggaagcatgccgcggttgtcaagcaagatccgccgccaaaacctccggagaaagaaaaagaaacgaaaga

SEQ ID NO: 762 - DNA, 624 bp, Arabidopsis thaliana
gctgattattgacgagagcaacgcaagttatgatttactcatttgggcacttgaaaaccaaaaagataccattgagagctccaaagtttatatctttgcaaaacagccacaaaattcctttactcctcctaccgtactttcttcatcagtcggctttgctcaaattttctatccattttcacctaattcagaactcataagattggctcaagaaaagaatatgaaaattgctttgggtatattagagaaagccaagaagatatgtttaaatcatgggatcaaggcagagacatttactgatgttggagaccctaaagatctaatccgcaagataattcaagaacgaaatatcaatttaatagttacgagcgatcaacaaagtctcaaaaagtgtacacaaaatacagattgttctcttcttgtcgtgaagaaaagacttcgcaaagattaaagattaaggaagttacaaaattcaccaatatatataattttctatgtggttaattgagattgtgtaatgatttggggttgtagtttcaggtgttgatttggggttgtagtttgaacttataatggtgttatgtgtataaatatttgtgtttatatatatcaagttagtataaa

SEQ ID NO: 763 - DNA, 624 bp, Arabidopsis thaliana
atttatcattccacttatagcataaagattagatccatcttagtttcaataagaagtttgttaattaacttattaattgatagcttcatctacataggagacttgaaactttgacactttcctctcatacaagaccgaggaactgcatagttttgggagatcctttcctttgtacgctttgcagacttgtgcgaccaaattatggtaattgtcatagagtggtttgccgttgagtgtgacccatggtacgtattcatgttttggcttcaaactcgaggtcagttttgcatacccaagtatcagcttttgagagagatcaccattgtaacaatcattgatggctttctcacgtccagattttttaacacatgattcccattcattcgtatctttttcaacgcagcgtatgaacttgtactgcaatttcggatcgggcaaagttcttataccgcaagcttcgagagcgttaagtttgcattcctcttcaccatgctggcaagtaatagtcagattattggagatatgagcgttaccgaatggaacgagcttgagatcggtgattttgaggagatcggagtcaaagattttacctagatcatcaacaatgaaattttgacaataggg

SEQ ID NO: 764 - DNA, 624 bp, Arabidopsis thaliana
ccttttttttttttttttaagatatagaaaatgaacagagttctctcataatccaaggcttgctttgatcttttagaacattctaatattcacagagatgtaaccaaactatacagttgcatccagaaaatccgactcaagcgatttcataagcacgagtcaaccaccacagatgaaccaaactatatacagtttgcatcagaaaaaaattctgattcagcggagttcatgagcgagccacgaccatcattatctgaatttagccttgagcccagcagttgaggtacatgacttgtcggagagactcatcgggagtggaagaagaggtacgacgtctttcttccgaagggagagagtcgccggttagatctgcggcggcgagaggacggagatcggaggaaagtcttcgttggagacggtgagcagaggtgagaccgctttttaacttgacgccgtgatcggcgtttccttgaacagctacgaacgatgctgccatccacactttgttcagataactcattctttaatagtgattatatgttgtagatcctttcttcgtaaattggaaacctttgaaagatttgagaagcttttgttaaaaaggaagattagtcggacgcgtgg

SEQ ID NO: 765 - DNA, 624 bp, Arabidopsis thaliana
ccgctagttccaatcatcggagcaatcataatcctctccgtctgcgccggaatcttcatctgtttccgtaaacgaaccaaacaaatcgaggaacatacagattcagaatccggaggagaaacattatcaatcttcagcttcgacggcaaagtccgataccaagagatcatcaaagcaacaggagaattcgattcaaaatacctaatcggaaccggaggacacggcaaagtctacaaagcaaagctaccaaacgcaatcatggcggtgaaaaagctaaacgaaacaacagactcatcaatctcaaatccatcaacaaaacaagagtttctcaacgaaatcagagcactaaccgagatccgtcaccggaacgtcgtgaaactcttcggattctgctcgcatcgccgcaacacgtttctggtttacgagtacatggagagaggaagcttgaggaaagttttggagaatgatgatgaagcgaagaagttagattggggaaagaggatcaacgttgtgaaaggtgtggctcatgctttgtcttatatgcatcatgatcggtctccggcgattgttcaccgtgatattagtagtgggaatattcttctcggcgaggattatgaagcgaag

SEQ ID NO: 766 - DNA, 624 bp, Arabidopsis thaliana
gccgcccgggcaggtgcagtatttgtaagaaaatggcttccaagactttgcttcttttgggtctctttgcatttcttttcatcgtctcagaaatggctgccgcgggcacggtgaagtcagagagtgaggaaactgtgaaacctgaacaacatggtggtggattcggtgacaatggaggaggaagataccaaggaggaggcggccatggtggccacggagggggaggataccaaggaggaggaggacgataccaaggaggcggtgggcgacaaggaggagggggaagttactgccgccacggctgctgctacaaaggttaccatggctgctcaaggtgttgttcatatgccggagaagcggttcagactcagtctggtcactaaatctacataatatatcaaccaccatgagtgtacgatttcatttatatatacacttacgtgtgtatgtgatatgacaatacacttacgtttgtaatgaagtgccttaagtttaagaggagaaactatcggaataaagtttcataatgtaatgcctttgtgtttatttaagttgttatttgcgatgtttgcataataaagttgtttctagttgaagttaaaaaaaaaaaaaaaaaaaaaaaaa

SEQ ID NO: 767 - DNA, 623 bp, Arabidopsis thaliana
aaaagagaatctttgaaattagaaaagattgattttgctcacaaccaaaaaccaacaataaagtatttacaggtttcaaatgcatgacattattggactagaaacaacaaccaccctgtcatgtaattttacaaacttgcaaacaaatcatcttccaaagatgaagtattatcacacacacaaggttcactggccaagtatatccgctactgatttcttgacaattttcgaaagctcctgtctgtccggtttgaacaagagatatcgatatgtgaaccacgtggagaacaagataccaactagttcgaatccgctcgagataacgggcaatttgtcgattgccgtgatgagattcaatgatgcccaaagagctacaataccagcaaaacccaaaccaataagacctaacctatcttcagacttatcccaaacattctgaatcgtactaacaacgtcgagatcagtcgatgaatctgagctttctccactagctttcaccatcagactgatgctgctagggtttcgagtaagagataatggagaaagatcattcgtacctcgagttagagaaaatgggagtttttgaatcgatgtgagattggattttctctgtgtgagtaaca

SEQ ID NO: 768 - DNA, 623 bp, Arabidopsis thaliana
tcttattttacatatgtgggatttagatgtggattaagaaacgttttagcatgtctcactcttccaatggcacaaagaaagaagttcacataagaacctttttttgatagtcacataaagagaggaagaagagagagtccaaaatgaaacaacaatggacagagatgtttatgaaattcactcaaaatccgagttcgacggccgggatcattccaccagaagctacaatctgttgctccagcttgaacagagtctctaatctgtttttcacaagataatactcttgcttcacttgttgcaaacatctatgacatgcttcgacattttgctgctcgcagaagctgcggaagacaacacaagcattcttaactctctgtgctcctatactggagctgctacctttgagttgatgaacatggggatcaacttttttaaagtctacaacttgttgatctagggaaagtgagagatcattgagaatcctatcagagtcttggaagaagagtgtgacaacttgtgaaacaaaatctggattgctttcatcttgtagttgttgcagctgcaagaactggctgtccaaaatcccttctaagaagagtgatttggtgtaatcttgcaaactc

SEQ ID NO: 769 - DNA, 623 bp, Arabidopsis thaliana
  misc_feature (1)...(623): n = A,T,C or G
ttttttacattcaaatactcaacttcaaacaaaattttgtagaatccaagtttacatcatatataattcactcacgcaacaaacaagaagatacaaaaacaagatgcattcccgctaataaacaaattacacaactaagtgataatttatttcattttggcgtttggtcttttggctaactcatatggaatcataaaccgatgtatcaagaacccaaacggccggccaatacacagatccgatccataactttccatcttttgtctcataagcctcactaacatatttcaccgtcttcccttcactgtcctcaagtatctcaagaatctctcctgtctctccagagagtttcacgacaattccatgaggttttcctccgttcatgaaatgaattacagtctccatcttcatcgtgttcatgaaaaaccttccgacccaagtgtgaatcaaaactgcacgtgtgaacaaattctttttgcaatgtaatgcgacccagaaatcgcctgttggcgtannncngatattgtccggggaaccagggagcgttgcgaaaacctcgttggttccggatttgggacctttgacccatattctatggcaaatgttcgtactactctcgcatg

SEQ ID NO: 770 - DNA, 623 bp, Arabidopsis thaliana
ctttttttttttttttttttttttttttttttaaaaaaaacttgtatcacaagttttgttgcttctcttataaaccaagggaaaagtagattatccggtttatggaaaaataaacatgcattcacttattttgaatgagtttctaagcggtaactccaatgggaacattcttgagtcttgatgttccataaagggtttcttcgaagcggatgatctcgttctttgagccataagcaacttgagttctatcgtcgaggttgatgatggtcttgtcaagcacggacttgtgtccatcactgctgaatccaccagcattctctatgagcaggccaagaggagccacttcaaacaacagcctcaactttgccttagccgtaggagaagtcacatttgtgaagattcctttctccttcacaataatctggttaacatcaggaaccattcctccggtgtatcgcagtgtgtatttctctttcacgtagtaatcaatcagcttgctgtattcggagttgtcgaatgtggctcttaagtttcctggtgagaacattttcccttctgcgatctctgttgtctcctttacatgctgccatttcccttcatcaagaagcaagaactcatgagtt

SEQ ID NO: 771 - DNA, 623 bp, Arabidopsis thaliana
tttttttttttattacacgaaatgatcatcataattatataaggatagaaaaataaatcataacacaaaacgatagatagaaaacgaaacagagtagcaacagttacatggtgacccaataccacttaaaggtcttattatgaaccagtacgaagactctgtagtaataatacagagattcaaacaaacacaacaccaacgtcggaagatattatgtagaaaggtatgtgacttagctctttatttagtagatttttgaggctaagcaaacacacattctcattacactctctagcacagagagggtttagtttactcatcgtcttcgtcacgacgcttctggtggtgatgcttgtgacggtgcttcttcttctcctcatcctcatcagagtcattgccaccatatttcttgcggccatagctcccttcctcatcatcaccagaaccagaacggttcctacgctgctcatcatcatcatcgtcattgccacggccatagctaggctgcttcctgtaactcccctcttcctgttcctcagacctcccataactaggcttcctgtaacttccctcctcctgttcctcagatcttccatagctaggcttaatgtaactctccacct

SEQ ID NO: 772 - DNA, 623 bp, Arabidopsis thaliana
cttttttttttttttttttttttttttttttttttttttttttttttttttttttttagacaaatttaatatgcctttattcatttttatgtttatataatgagatttgaaaccattgagttcctacgattggggaaacaaatacatatgtgtgatttaaaccactgagtaatatgttcacaaactctcagaacaggggaagtgccctcctattattattgtgcttatataataacaaaaactaaaccaaaagatgactcaagtcattcgacttagcaaagtccaaatacttctttatttgttttcttgaacgttggggtcgtttctcatcatcttcccaatgtcacctcctcaaaagcttaccggtactgaggagcaagttcaccgtccttgacgatgtaattctcagtagggaagtcttctcccttgaagtatctctccaacatgtctttcgtccccgccgcataccgtagctgagcgtcaatggtggtgccggaggtatgaggggtcatagcctggttaggcatgtaacgccatggatggtccttaggagctggctgtgggtcccaaacgtctccgctgtaccctccaatgtgtccactctccaccgcatccaccactgc

SEQ ID NO: 773 - DNA, 623 bp, Arabidopsis thaliana
tcttgattaagtagtgaagctagatatcataaattaaggagtggttacaaagacttgtagaaatacaaacacatattcacatgacataaaatcttgtttcttctagttggcatctttttgaaagtcaggttcacagaattctcctccaagatcatcgcaggcctcttcacggaaaaccctgtttccaagtccaaaaatcacaaaactcagagatgaaaaatcaagctaaggaaagggttttaaaaaatgtgaaaaacacttacgttttggggctgttatactcttcgtattctctgtcaacgggctctgaagccacgggacgtgagacgggctttgtatcgagcttgacttcagggtaaatatcagcagaacaagcgtatccactgattacttcgcatgcttcagctggaaaaacactgagtatagagatgttattgagtaagtcaatgagaagagaaacaagaggggatgaactgaggaagtgatcaaaaggacttacgaaaggatggaggagttatagtcgacggtgttagggtcagacgttaaggatgatgatgatgatgagttgtttgatctgagagatgagagtcttgaagctttggttgcgtgaggaagaagaaaag

SEQ ID NO: 774 - DNA, 622 bp, Arabidopsis thaliana
tcgagcggccgcccgggcaggtgctgcatcgcataaccggaagcttgttcaacctcccgaaggaactttcttctaatactctcaaagcctacctttgaggggcttctccatttctggcgcgagcggccgcccgggcaggtggcgaagaacaaagtttgaaccttttcttcatccatctctctccgtcgcttcttcctaacgattccttcactcgaatcaggtttgtgaaggttttttctagggtttcgaaaagatgccggcgacagcaggaagagtgcgtatgcccgcaaacaatcgggtgcatagtagtgcagcgcttcagactcatggaatatggcagagtgcgattggttatgatccttatgcaccaactagtaaagaagagcctaagacgacataacagaaaaccgaagatcccgagaactcgtacgcgagttttcagggacttttggctcttgctaggattacgggttcgaataacgatgaggctcgtggttcttgtaagaagtgtggccgtgttgggcatttgacgtttcagtgtaggaatttcttgagtactaaggaggataaggagaaagatcctggtgcgattgaagctgcggttttgtcggggttggagaag

SEQ ID NO: 775 - DNA, 622 bp, Arabidopsis thaliana
  misc_feature (1)...(622): n = A,T,C or G
ttttttttaagtcaaaatttgaataagactaaagtattaattgcttctgtcccacttaattctcccacatcttcacacgtactaatatattatacatatatatcaactaaataaaaatatcacaaataaagaactaaaacaaataaaaacgaactttaataaaatcccatatcttgtttctctctctctctcaaagttagtatctcagtacctttacgctttgtttgtctctatcttcttcctgatattcagagaatggtttcatcagatgattggacgaagtgtgcgatgagagatggagaagtggtggcagagcttttggtgaagcttaaagaagccaaagtaatcaagaatccgattgtaacagcgctccggtggggaatccaacagccaaggtctcggtgtccaagaaaagaatctgaatctagatgtagtccaagtacaccactatcttggagtggtggtnnnnnnngttcttcttcttctccatctggttatgtcgatggttacgaagctactagtcgtcaaatcagtgccgttggatctagatccaaggtttgttcgtgtctctcttctctgttttggattcatcataatcttacctagacatgtgtctttactc

SEQ ID NO: 776 - DNA, 622 bp, Arabidopsis thaliana
ccacgcgtccgagaaagacttcacattttaccattatttgctctgagctcaggtcagcttttctctcttcccctctctcctctctcttctactttatggtacagttgaattaacaatgccattgaactactacttccatgaatgtatcttctttacacttgttgtcttaagtttctatttttgtctgatccagatctagtttcttctcttgtgtcttgtgaacactttagcttcttactgtctttatgtttgttgttgttgtgtcggtttgtttttcatttttccagtaatgttgaagaaacaagttcaagatctgacttaagtaacttacactagttttagtttgctagtagctatataattctttgatcctgttaaagaactcaaagatcattcgttcttgaaaacagatccggatctgagatagggttcttgataaagattcgatatttgaatcctgatttggtttcttgtaatgcagtaggagagttcaagaaacaatggcaaagatgcaattatcaatctttatcgctgtcgttgcgcttatcgtctgctctgcatctgctaaaaccgcaagccctccagctccagtgctgccaccgacaccagctccagcaccagc

SEQ ID NO: 777 - DNA, 622 bp, Arabidopsis thaliana
  misc_feature (1)...(622): n = A,T,C or G
ccacgcgtccgctctataacaaacattaatacacacaccaaaaaaaaacctgtttatgtctcaaagatctctgattcctcattcttcttctatagcttttggtctccattctcatctcttaatctccagtgagatcagctccaattctaactggtctctctaaataaaaaacagaaataaaaatccaacctttttcaattttcgttcaattttcccggaaaaaaaagcgatccttttgatttttcgatttctccaagtaacaattcaaaatgggtctaaagggttttgctgaaggaggaatagcttcgattgttgcgggttgttcgacccacccgcttgatctaatcaaggtccgaatgcaacttcaaggcgaatcagctccgattcaaaccaatctccgaccagctcttgcttttcagacttcgaccaccgtcaacgcgcctcctctacgtgttggtgtaatcggagtcggatctcgtttaataagagaagaaggcatgcgtgctctgttttccggcgtctccgccaccnntcttcgtcaaactctgtattcaacgactcgtatgggtttatacgacatcatcaaaggagaatggaccgacccggaaacaaaaacgatgcc

SEQ ID NO: 778 - DNA, 622 bp, Arabidopsis thaliana
  misc_feature (1)...(622): n = A,T,C or G
aaagagaagagggtagagacttcttttctttgtttctgtggaggctcttcttcttcttcttctctgtctctgtctctgtctctctgtaatcttctgtgctctccacaaatttgtctctcctctctctcgccgactccacaaattttgagcttctttttttgaagttcttgagaacaagtgaaagagcttaatatccacaagactcttgtttctttcttaaatggctaaagtttattggccttatttcgatcctgaatatgagaacttgagctccagaatcaatcctccaagtgtttctatagataacactagctgcaaagaatgcactcttgtcaaggtggacagtatgaacaaacctggaatactacttgaagttgtgcaagtcctaaccgatctcgatctcactatcactaaagcttatatctcttctgatggtggatggttcatggacgtattccatgtcaccgatcaacaaggaaacaaggttactgatagcaaaaccatcgattacatcgagaaggtgnnnggaccaaagggtcatgcttcggcttcacaaaacacttggcctggtaaaagagtcggtgtccattcattaggcgaccacacatcgatagagattatt

SEQ ID NO: 779 - DNA, 622 bp, Arabidopsis thaliana
cctttttattaatgaaacaaagaaaaaaactcagaaaatagtactactaatccaccactgtttataaataaaccggtgatatttaaaccaaatgcaaaaaccataaccggacaatgagaaagtactgatgatgaaaactactcaaatgtgtaaaaaaagcaagaaaggttcgtaaaatcagaaatttaaaagtaacgataatttgagctaaaaataaccaaaactttggtggctttttctttttggctcatactgctctcaagctttgccactggctgctggtgggttaagctcatcccaagcttcaatccatgtaaccatggcatctgcaagcttgtcaaagtacgggtctaaggagctcaacttctccttgaccatctttgagagctcaatgtagcattgctgaacagttactgcttctttcgatagctttgcgttctggaagaacggaatgatctcctcctgccagaagattcccttgtattccttcttcaggttaacaaaagggttgctcgctttgctgtggtagatatacggtaaaccggtcttcactcccaagctcaagtggtcacagatcaccttgatgcaccaaccagcccacatatcgtcgtaacgaccaata

SEQ ID NO: 780 - DNA, 622 bp, Arabidopsis thaliana
cgaaactcttttattcattttggactgatactacatgaataccatacaacaaaagaagtcaattcttactaattcttagcaaaagctatgaacaacatcttgacattgtttatttcatggtgcaacttagcgaactgggtatgaagtgactttcttaccgcatccgagactccgccccggactgacatctttaccggatccgcgaacgggctggaggaagaattctcgaccatatactcacccgcaatggcacagacttcagcattgtttgtgtgaaacaagcattcggtccaactgttacaattcaccacctcttggagttcttcgacagaacactgcgcatctgtagtgtatgtttcggttgttggtcggcagtctgcaagggtttggaactggctcttcctcaggtgtgagatgaagagcttcgtggacagcgcttgtttcagactcacggcgatagctgcatccacgaggcgtcgagggcttgtttggatcgtatttgcgtagaccgagagcgtgtccacgcacagggattggtacgttgtaactttgcaagaagattgaatgaagtttagtgcttttgtagaagttccggccgcggtgacggtggcagccgtgaggt

SEQ ID NO: 781 - DNA, 621 bp, Arabidopsis thaliana
  misc_feature (1)...(621): n = A,T,C or G
gggtaagattttcggaatataacgataaatggagggcatttctagaaatattacatgctctctctcttctctgacagttacttgagaaaatgattgnnntaagccaannattaaaggaaaactccaaaagtttccaaatatttaatcttggaacccaaatttttcaaaaattgcatttcgaaccctactcagatctcttcctttcaatgtcctccctactccttcatgaaccgagaacgaagccattctcgtcttcgccagaaactcatgcggcggtaaccaatcgccaccgtcttcgttatcatcgtcatcgtcgtcgttatcctcgatgcttctccgtcggttatcgcggtattctccgcggagaatcttggaccagtccggcacgttaacaggaagcgacgacgctgctgcggcggaggaagcggcggagggacgattcgacgattttttaccggatctgactgatgaagagattttacggcaaaaatctggtgaatcggagtggattggattgaagagatcggattcgtcgaattcgagacctgaatcggaagcggtgaagtaagacggctgatcggtgccgagaaatcgatagctaggcctagcgtagtaactctt

SEQ ID NO: 782 - DNA, 621 bp, Arabidopsis thaliana
aagggaaacccaaaggtagaatcgaattcaaaaggaggatttctggtccctgcaaggagacttaccattgctcactctgataatcctgaaaaatggacctggagtgctatctatgacagaccacacaaagcagacatcgaaattgcaacgatgattaacactcacgccttgataaaaataagtggagattttcacacgagaaaattgataccagggaaaaagtacgaggtggtgtttattgtgagcctagatgacacatctttggggtggaagaatgaagtgaccctgacgctgaaggtggttatgagtgatgaagccgctaatgtgaaagcgaagaaattgtgtttggacgaatacataggagaaaattgggtggatattcctgttggagactttgaggcaccgcaagagaaagaggacgcaaagatctttttctcgatgtatcagcttttgaacactgagaggaagagtggtcttgttgtcaaaggctttgcaattcgtccagcgcagtaaggcacaaaaccaaagcatattggatctaatttctgttaactatatttatataacctctattatggtttaaagtttgtaattttttcctgtaagtcagagtctgtactt

SEQ ID NO: 783 - DNA, 621 bp, Arabidopsis thaliana
  misc_feature (1)...(621): n = A,T,C or G
ccgaagcaacctcgtttactctctacgccagtttcagcgcttagacatccctttttgcaatcannnntgatgaaatcaatgagataagggaagagcaagaacagctcgcaccctttgatccttccaagaagaaaaagaagaagaaggttgtgattcaggaacctgtcgaggacttagcagagtcttcacagactgagaaatctgattcattgcctgttaatgatggtcttgggagttcatttactggaatgaagaaaaagaagaagaagccagctgaatcaagcttattgaacaacgaaagtgttgatgctggggaagatttggatgagattgctaatgacgagcaagagggggaagaaggaatagttnnncagcaacgttacccctgggagggaagtgagagggattacatatatgacgagcttcttggtagagtctttaacattctccgtgaaaataatccggagcttgctggagataggcgtcgtacagttatgaggcctcctcaagttcttcgtgaggggacaaagaagactgtctttgtcaacttcatggacctttgcaagacgatgcatcgtcaaccagatcatgttatgcaatacttgcttgctgagttgggta

SEQ ID NO: 784 - DNA, 621 bp, Arabidopsis thaliana
tccgtgtccaagatcttagctttatccgacaaatataatgcatccgaactaaaaagcgtttccttaaaattcactgcagaaaacctagcagctgttctgcagacaaaagcatatgaagatctgaaggatgactgtccaaacctccagtctgagctactaaaggcggtcgctggttatgacgacacaagtagcagcggaggaggaaagtctcagagtgtttgggctcaactctctaacggtggtgagaccagtagccgaagggtcaggcagcgaaccacttagaagtgcttcttcacatgttgttaacaaactacttttgcttaccactcgtaaacagattaaccggtttatctagtatgtaccgaatgaaagggaagcggagccagaaatcttgtaccacaagagaagagctatgcggctgtgcactagtgattaaccggtgcttaaccggtgcttcacctttcagttccttcacgtctctgtggatttttgttgttgagtctttttttcaaattcttttcccagcttcaaattactagaaacttatgatgatataatagaaagagttaactatattcctgtatggaagttataatcttgcaacttgtaacacagaatcct

SEQ ID NO: 785 - DNA, 621 bp, Arabidopsis thaliana
  misc_feature (1)...(621): n = A,T,C or G
agtcctaacttcgagttgaaacaaacaccatttctcatctctatctcagaaagaacaaaccatttcgtgnnctttctttctctattctcataaggaaatataattcctgaaactgttgagttcttgtgaaaggaaataaaaaacatgatgatgggcaaagaagatctaggtttgagcctaagcttagggttttcacaaaatcacaatcctcttcagatgaatctgaatcctaactcttcattatcaaacaatctccagagactcccatggaaccaaacattcgatcctacatcagatcttcgcaagatagacgtgaacagttttccatcaacggttaactgcgaggaagacacaggagtttcgtcaccaaacagtacgatctcaagcaccattagcgggaagagaagtgagagagaaggaatctccggaaccggcgttggctccggcgacgatcacgacgagatcactccggatcgagggtactcacgtggaacctcagatgaagaagaagacgggggcgaaacgtcgaggaagaagctcnnnttatcaaaagatcagtctgcttttctcgaagagactttcaaagaacacaacactctcaatcccaaacagaagctagct

SEQ ID NO: 786 - DNA, 621 bp, Arabidopsis thaliana
ccacgcgtccgatctaaccctctcgatcctctctcgcctgttgaaaaagcacgacgcaagagctaaggatcaaaaaggaagacgaagaaagagatggatccagacgctgttgcaaaggctttcgttgagcactactactccaccttcgatgcaaatcgtccagggttggtttctctataccaagaaggatccatgttgaccttcgaaggccagaagatccagggctctcagaacatcgtcgctaagctcaccggcctccctttccagcagtgtaagcacaacatcaccaccgtcgattgtcagccttctggtcccgccggtggtatgctcgtctttgtctccggcaatcttcagctcgctggtgaacaacacgctctcaagttcagccagatgttccatttgatatcgaatcagggaaactactacgtgttcaatgacatattcaggttgaactatgcctgaggaatttgatgccagaggtacatggaaccattattggaagctgaaaagagagtggtggaaagtttgggactattcaaaaactgtttgagttggttttagatttggaacattaagctttgtttcaggtggtttgctgtctgtttttattttaatcaatgg

SEQ ID NO: 787 - DNA, 621 bp, Arabidopsis thaliana
aggtcgtaatcataaataaagatcttcttgtttaatttctcttgatcctcgcaaaatcacagattcttgaaattcttttttcttgtcttgaaattcttgagttcttgagttatgaaaagacaatggacagagttatgaaatgataaatctcaaccaattccttgtttatcattctatatcagttgtgattcttcattggttttacgttatctcttgaacaaaaaaacatggcaaacgcagagaagacgagttcaggttccgacatagatgagaagaaaagaaaacgcaagttatcaaaccgcgaatctgcaaggaggtcgcgtttgaagaaacagaagttaatggaagacacgattcatgagatctccagtcttgaacgacgaatcaaagagaacagtgagagatgtcgagctgtaaaacagaggcttgactcggtcgaaacggagaacgcgggtcttagatcggagaagatttggctctcgagttacgttagcgatttagagaatatgattgctacgacgagtttaacgctgacgcagagtggtggtggcgattgtgtcgacgatcagaacgcaaacgcgggaatagcggttggagattgtagacgtacctcggccgcga

SEQ ID NO: 788 - DNA, 621 bp, Arabidopsis thaliana
  misc_feature (1)...(621): n = A,T,C or G
gattgagattgctcttacgcttaaaggtgtttcgtatgagttcctggagcaagatatcacaaacaagagctctttgttgcttcaattgaatccggttaataagatgattccggttcttgttcataatggtaaaccgatttctgaatcacttgtgattcttgagtatattgatgagacttggagagacaatccgattcttcctcaagatccgtatgagagaactatggctcgattctggtctaaattcgtcgatgaacagatttatgtgacggcgatgaaagttgtggggaagaccggaaaagagagagatgctgtggttgaagcgacgagagatttgttgatgtttttggagaaagagcttgttgggaaagattttctcggtgggaaaagtttagggtttgtggatattgtggcgactttggtggcgttttggctgatgagaacggaggagatcgtcggggtaaaggtggttccggtggagaagttcccggagatacatagatgggttaagaattngttgggtaatgatgttatcaagaaatgtattcctcctgaagatgagcatcttaagtacattagagctcgtatggagaaactcaatatcaaatctgcttgataagg

SEQ ID NO: 789 - DNA, 621 bp, Arabidopsis thaliana
ctcttgagctctgttaccgatctctgtgttcatgtggtgatcgtccaatagcagatggaagccttcttgatttcttgaggcaagtctcaacctttgggctctctcttgtgagacttgacataaggcaagaatctgaccgccacactgatgtattggatgctatcaccacgcatttagatatcggatcctacagagagtggtctgaagaacgccgccaagaatggcttttatctgagctaagtggcaaacgtccgcttttcggttctgatcttcctaaaaccgaagaaatagctgatgttctggacacgtttcatgtcatagccgagctaccagcagatagctttggtgcttacattatctctatggcaactgcaccttctgatgtattagctgttgagcttttacagcgtgaatgccgagtgaaacagcctttgagagttgttccgctctttgagaagctagcagatctggaagcagctcctgctgcagttgctaggctcttttctgttgattggtacaaaaaccgaattaacggtaagcaagaggttatgattggttattcggattcaggaaaagatgctggacggttatctgctgcttggcagttatacaaagctcaag

SEQ ID NO: 790 - DNA, 621 bp, Arabidopsis thaliana
cttttttttttttttttttttagttcaaagagttgttataacatccgcaagattttacatgtagtgtgatccctttttaaatttgttttgtttgtctagcattattatataaaatacgaattaaaatcttacaaatcataagattgtttcccagtgaatttaacctcaatgggactaacatttttaccgatggatctcatgtttagtccaacaccttctcttcctggattcgctttctctggataaactccatctttcgggtgaagatattgaacctctccgttagggaacactctgtaaaactggtaagtgatcttgtactttgacctcaacctcgtacctaaagccaaacactgttctttcctcgccagtttcaatagattcggtccttctctcattatcgcagctcctcctgttggcatctcaaagatttgttctttcggtgagttccatgtgatcacgtaaaattcctctacttgtgctttacggaggagacctcctgtgcttccggcgaagattggtgatggtgtgtttgggtctagctgcgggggagtgaatccaactggagcttctttcacggctggggcagcagaggaggactctgttttctcggcgcggatg

SEQ ID NO: 791 - DNA, 621 bp, Arabidopsis thaliana
ctgttaataatttattgcacctatcaattcaaatatagtcaaagttctcttcttgtgacaaaatcaatcataattgtacatcaaaaccaaattgctcatacaaaaacagaacatgccaatcatacatacattacctatatgctaatcaacgagtgatgtattgaatctcggctcggtcttttaaccattcaagcacttttgctccttctaaaatctcttgtacctgatctttcacacgctcctcgtcgaactcttgtttatgtttcttgaattctgagatcgagttttcgacctctttaactagttcatctgttgagaactctaagttttcgcgcttgaagatatctccaacagctatattctgcttgattatgttggtgatgctctctctttgagtttctagaaactcatttactgctttttgacttgaaagagaagccaactggtcttcgttaagcttcatgtttccctgaatctctagaagcctagctccataaaactgtcttccttgttcctcaaataaagatcgaggaatctctacttcaaccatctttcgaatctgctcaagaatggcgttgtctgtcgcttgctccttggcttcctgctccatctcttgacatc

SEQ ID NO: 792 - DNA, 620 bp, Arabidopsis thaliana
ccacgcgtccgagaagatgtgaacctcttagaagagatgtatccgcaaggagagcaggcagagactgcttgggccttcactgtcctgggatacttggccaagtttgttcttggaatcttaggattaattgtttctgtggcttggattgctcacatcatcatatatctacttgttgaccctcccctctctccttttctgaatgaagttttcatcaaactggatgacgtctggggtcttctcggcacagctgcctttgctttcttctgtttctatctcctacttgctgttattgctggggcaatgatgcttggtttgaagctggtcttcattaccattcatccaatgaaatggggagccactcttatgaactcttttctctttaatgtcggtctcattctcctctgttctatcagtgtgattcaattctgcgccactgcatttggatattatgctcaagccaccgccgctcaggagatatttggccacactttgcagtcccttcgcggtattaagtacctctacaagtacaatgtgttccagatcgggtttgttgtcctcgctggattgacctttttatattacattgcctttggatggagaagaaaaaagccgagcggcag

SEQ ID NO: 793 - DNA, 620 bp, Arabidopsis thaliana
gcggccgctcgatatctttacaaccattaaacaaaaaatttggccactacaagttgaaaaagttttgattatatctaatcgctgaaatggattacaaggtatcaagaagtggggagatagtagaaggagaagtagaagattcagaaaagattgatttaccacctggtttcagatttcacccaactgatgaagaacttataacacactatctaagaccaaaggttgtaaactcttttttctctgctatagctattggtgaagttgatctcaacaaagtcgagccttgggacttgccttggaaggctaagcttggggaaaaagagtggtacttcttttgcgtaagagaccgaaaatacccgactggtttaagaacgaatcgtgctactaaagccggttattggaaagctacagggaaagataaagagatcttcaaagggaaatctcttgttggtatgaagaaaacattggttttctacaaaggaagagctcctaaaggagtaaaaacaaattgggtcatgcatgagtatcgattagaaggcaaattcgctatcgataatctctctaaaaccgctaagaacgaatgtgttattagtcgtgtttttcatacacggactgatggt

SEQ ID NO: 794 - DNA, 620 bp, Arabidopsis thaliana
gaaagtctgaagacaaattcttccattagaagaagaagatggctcttctctgcttcaattctctcccttctctctcttctctttcttcttcttcttcctcgcgccttcttcaatctccgtctttcgcttctccagttttgagccttaaacccaacgctgtcgagtccaagaacagagtctctctcagtgcttacagcttgaactctagccatggaagaattgtggtgaaggcggctgcttctggcgtggacggggctgagcctgagagcaatgaggaaccaaagactgttgttgctgctgttccagtggataaactaccgttggaatcgaaagaagctaaagagaaactgctcttggaattgaggctgaagatgaagctggccaaaaagattaggctacgcaggaaacgtctggttcgtaagcgtaagatgaggaagaagggtcgatggccaccttccaagatgaagaaaaacaagaatgtctaagtgactcaactgtttgctgcttttcgtattcgttttttgtaatgttctttttggtgttcaaagaccattaatgtacttcaaatgcaaccattgtttttggatttaacttcaaagctgagttctttaaagaaaaaa

SEQ ID NO: 795 - DNA, 620 bp, Arabidopsis thaliana
tttttttttcatgaaaaatatcattcatagggccactctcattttttttaggatttagaacaaaatccgaaaaggagtgacataacattacaacattaggaataaagtagataaaacattgatcaaaggaaatttagttatagttgaaaatttttattataaaaagggaacgaagggagattttttcaagggcattttggtccaccctcttgagttttccagttgttgtagcaggagcaaacttgtttgttcccatagtaacccggaggcacacagagacacttcctgcagcatttgttgcagaacgtaatgcaagccttgtggtactgtgtctttttacacctcctatcacattccgatgggcattgggtacgtttcaggcttcctggtccataacgtttctggctccacttcacattagatccacttgaggccataaccatggtttgaagcatgaagaggacaatgagggtcaagaggaagatagctccatatgacttagccattttcagtttgggatattgttatccaaagaaccaaacactcctctaaatctcctcaaactagttttagtctcttgaggtatgaaaagaagtgtactgagagaggcggacgcgtgg

SEQ ID NO: 796 - DNA, 619 bp, Arabidopsis thaliana
tagctcgaaacgcagcgtctcatagaagttgactaatgctgcttttgcagcagaataaagactcatccgtggtagaggcaaccagttttcaaccgatgcattcacgactattcggccattcgtctggtgaaggtatggcaacgctacgtatgtcggataaacattcccccagaagtttatgtccagcaaatgtggaaacacagtcgtgtcactcacttcctcaaagtaaaaagtgtgtccaagactcgctgtattcactagatgatccacgcggccgtaatagttgacggcttgggtgataaaacggcggcagtcatcttctttgatgacatcagcagcgatgatgatcacatggttggctccaatctgtttagccttattactcacaactctcagtctctgctctctcctcgccaccaacaccaaattcgctcctctttttgcatattcatatgctatttgctctccaatggccgatgaagctccggtgatgacaactactttatcttccatattttcggtggcgaaataagagttgtaagcccgttcggagaagctaatgaaagacagtaatggccatgcaaaggccatcaccaccatggtcgctggaggcgccacc

SEQ ID NO: 797 - DNA, 619 bp, Arabidopsis thaliana
ttttttttttaagatcaacggaagcttaaaaaaagtcactaaaaaattaattaagatttctgttaaagaaaatacaaaatggaccccaacagcaaaaacaaagacaacatagtattaagagattagtctacatagcaaaagtacaacaacaacaacaacacaccaagaaaagaacacatccccttctcttacccagaatcctcctcttggcctcagttcactcattagattcaccagcaaaaagaagagtaaagaccgaaacaagccggattcaacaactatacaatgttgcaggtgttcgttttccttcagcttcttttgttacctaaaccttttttcgttttaagagatgttcgatcacaagaacacgcagcggttcttgttttttttcttcttcttctgtttcggtggctgaagcaccacttttatggctgcgtcaaagactgctttcacattctgctgagtctttgaactacattcaatgtagattggtgatcctatcagtttctttagttcctctccctggtttgtagtaataggcactgcaccaggatggtctatgaagaattgcttgtcatctcgaagatcgagtttcgttccaacgaggattataggaaca

SEQ ID NO: 798 - DNA, 619 bp, Arabidopsis thaliana
  misc_feature (1)...(619): n = A,T,C or G
gtaacgagtccagagatttcatgtgaagaatgaagaaagacatatatacaatacaactgaattaagcaagnnnctccacaacattgtctatcgatttcaatgtcttctcgtagtaaagataggactcgtacacctttggcgtccgtacatagaaatccaactcactcatgttttcgacaagctcgtttgccgcctgaacgtaatcattccggcgactctccggcaagatgttcatggcgttggtgagatcctgagacagataagcctgtttcaatcttatgtagaatataacgtacctccacgacatgtggtccaacatctccctcatgtctcttaatccttcagccgtctgttttatacgcgccgccgcatcctcaggtgatagtcccggcataaaatatttctcctttatgaatgaccttgtcccccatttctcctgtgctaatgctgatgacgtagcaccgccgatgaccgtgaatgttattagtgaagtcaaggttctccggcgggtgaagatgtcttgttggggttctccggtgcaacatacgacggagaacggttggtttacacggcgatgataaattttccggaggagatacggtggcggagtgttggtggt

SEQ ID NO: 799 - DNA, 619 bp, Arabidopsis thaliana
  misc_feature (1)...(619): n = A,T,C or G
tttagttttattaatttacttatttatttgtatgtgctactttttattagatccacttttgctagcatgcctttatatgcttaattcaatggtttgatcatacgtatacttattacagggattaattactgtaattgaagctcacatcatggaccatcatcagtatcatcatcatgatcaataccaacatcagatgatgactagtactaacaataattcctataacaccatcgtcacaacacaaccaccaccaacaacaacaacaatggattcaacaacagcaacaactatgataatggatgacgagaagaagttgatgacgacaatgagcactaggccgcaagaaccaagaaactgtccaagatgcaactcaagcaacaccaagttttgttattacaacaactacagcttagcacagcctaggtacttgtgtaagtcttgtcggngatattggactgaaggtggctctctccgtaacgtccccgtaggcggaggttctagaaagaacaagaagcttccatttcctaattcctctacttcttcttccaccaagaacctcccggatctcaaccctcctttcgtcttcacatcatcagcttcatcatcaaaccctagcaag

SEQ ID NO: 800 - DNA, 619 bp, Arabidopsis thaliana
tttggtcgcatacataaccattttctgcaatttccattggacaaaaaagatgataattatttctcgatactgttaacaaactactcatattcccccaaaaaagaaaaacattgcagataaatggggatgacaaatgtgcaaaaagacaaagatgccattgtgatgataagatgttgtgttttgattacaccatgagaccctcaggagcagcagcagcaggagccttgggtttcggtttgtcaacaacaatggcctgagtggtcagtaccattcctgctacggaagcagcgttctgtagcgcacatcttgtcactttagccggatcaatcactccagcttcgaacagattctcatatgtatcagtcattgcgttgtacccattctcccaatcgctgaacataatcttttccacaacaacttctccttcaactccagcgttctgagcaataagagcagctggtgacagcaatgccttttgtactatgtcagctcccaaacgttcatcagcatcctcaaaagtctccttaatggcgggaataacagtggagagatgcaccaaagcagcaccaccacctggaactatgccttcctcgatagcagcaaatgttgcgttctttgc

SEQ ID NO: 801 - DNA, 619 bp, Arabidopsis thaliana
gctcggaccatccggagcaactggttcggtcaccacctccactactacagctccaatccttaaccaagtctccacgtcagagcaaccggagaacaacaaccgaagaagcaaaaagaagcttgtcgtatcatcaatcgtcttagccatctcacttatcctcgccgccgcgatcttcgccggagtcagatcacgtctcaagttaaaccaatcagtcccaggcctagctcgtaaaccgagtcaagcaatctctaaagcttgtgagttaactcgtttccccgagttatgcgttgactcactcatggactttcccggctcactcgccgcttcctcctctaaagatctcatccacgtgactgtgaacatgacgctccaccacttcagccacgctctctactcctctgcttccctctccttcgtcgacatgccgccacgtgctcgctcagcttacgactcttgcgtcgagctacttgacgattccgttgacgcgctatcacgcgctctttcctccgtcgtatcctcctccgctaagccgcaagatgttacaacgtggcttagcgcggctttaacaaaccatgacacgtgtactgaaggattcgacggcgtcgacgacggtggagtg

SEQ ID NO: 802 - DNA, 618 bp, Arabidopsis thaliana
ttttttttttttttttttttttttaagaacgaaaaatatggttttaagttataagatcatacatccattaatagcagaacgagttaaatctcctttggcaccataaaacaaaaggttcaaaacgaaatggtttaagaagatttagaagcaacaataacagtcaaagggacaaaaacgagtaccaccagcatctttcctgttgaaaccaatttcattttccgtgaacactcgtaacccgtcttcagttgtcttcctgggtcggctatcttccgtatcgttattaaaaatactcgagctgggtcggctttccctgttgttacggagagttctcgtcctgagtggtcgtctcgtcctgaggagtcgtctcgtcctggatcggggtcccgtgtcgttactgagaattctcgtcctaggtcggctttcagtgttgttattgaccccaacattgagctcattcatctcagctctagtgtctctcgactcggatacttgggcttctggcgtgtctctcgactcgggattttggacctctggcgtcctctgagatctcccagcaaagatatcatcaatctctttcccaattttaccaggttttggaactagttttcttcgctgtac

SEQ ID NO: 803 - DNA, 618 bp, Arabidopsis thaliana
tttttaatctaatagtggtgacatatagattgaagaaacctatgcaaaagatagactataattgacaaggaacctatacacatattcaagaaaacaaaacctagatacagtagttactaattaacaataatatttaccaaaaataaaactcttaggctccggatacagtttggtcggaacaataagaaaatactacatgcacaatctcaaccgtggttgggtaattccacgttatgacgacaaagcggacaagtgttccgattactcaaccaattcgagatacactctttatggtaataatgccgacaaggaagctctgagagcctctcattagcagcaagctcctctctacatatagcacaaaccactaaacctctctccatcatttcctcagccgtaaactccaccaccggaagttcctcccctgcgttaagccaccgcgtacaagaggatgaattaccgagaactagaccaaagatttcatcgtaagatccaaacgtgttgactccatgattgctccgtgaatccaagtagtggaggtaacggaggtattcgtcgtcaattgatgtagtgtctgcttcgaaatcttcttcggtcggagtttggtctggttcggtg

SEQ ID NO: 804 - DNA, 618 bp, Arabidopsis thaliana
agatatatatatcaatgtgaacttgtatataagtaaacaaatacaaagtaggagattcaattcccatttatatcaacttcaggcataaaactaaaatcttctctgtgcttgcttagtttaacgaagggagatttgcaagagcatccctggattttctcaacaacgacttggcttcttcactcttttcgagttcaagtaaagaaacaacctcagccttaaaatctacttccacgggatgcaaagacgagattgtgctatacagttcgatgagctcaagcaggcattgggaagcagccacatgaaactgtgctatcttcacagtgtgtatgcactccaggagtttaggaactagtgagtgaaataactcatgaacgaattttgtcgcatcactaggtgaaaggtcatccatggagtcagtccatagactcggaaaccttgaacaaagctttcccacacatgaaattccagacatttttacagtccacagaaaaccaggtgataaggaaattataagaacatgaatcaaatctgcttttgcgctaagaatgtcatctatagttgccacttggatgcaagacttgacgcattccataattttttcaagagggacatgtccat

SEQ ID NO: 805 - DNA, 618 bp, Arabidopsis thaliana
cttttttttttttttttttttttttttttttttttcatcttaaaatatgatcatcagcatttgcacacaatgtttcacatttatttgacatacacgatcaaaacgaagcagttttgtaacaagataaaaatcgattgggttaaaagtgtaacgggagaagtaaaaatgtagtcatcactcatcatagtgactgaattcaagggaatattattcttggaaatacctgaaagatgggaaatttgaatttcagtagtgaatgacgcccagactcttcaaccaagggagcatctcctccaatccttcctttaggcttcgagggttataaccaagttccagcttagccttatcacaagagtatgaccactgatgtctcagcactgtcactgtcggaggactgataagtggaagctttcctgtaacccgagagattaaaacagataaccatccgtatgcgttgatggcccataatggaatgctaaagtttggctttttggttccagtaatcagtgcagccatgtcaaagacaagcttgaaagaagcattttccccagtgagtaagtatctttcaccaagcctacctttttccattgcagcaacatgaccctccacaacatcatc

SEQ ID NO: 806 - DNA, 618 bp, Arabidopsis thaliana
ctttttttttttttttgatatcacaacaaagtctcattgacccggagaaaatactgagtcgctcaatatcggtcattacatgataacaaagttttctgacccagagatttccaggaacataacagaagagaagagacaagcagtgagaaaagtcgaatcttacacgatacgctccagctctctggcgtagcttagagtctggttgatgagttgcagagacggaatctctttgcacggtgcagtttctttggctttctggaagacaacaaacccttccttcacttcccactcaggatgctcatctgtgacataggttaagagttcttgatcagaagagaacaacaacatctgccgggcatcgctgatagagacataatcataagctttctcgctgcatccagctatttcatctcttatggtctttgccaagagatccatgaaatagacgtaagttgcatcaggcgcggtctgtctagcactcaacacacggttataggcaccctccatgaaggattgctcaagctctactgcatgcttgatgcaaggatcctctagtgtagctgatgaaagtaattcaagctcggtgtggaattcagcaattctattttgtaccagcag

SEQ ID NO: 807 - DNA, 618 bp, Arabidopsis thaliana
ggcgggtaggcacaagctttactggctcaacgataaatccagatttccgacattcttcttctagaagtttgacctgagatggcccctcagggcagaaaaccaccacagctcctccgcttccagtgaactttgcagctgcgccgatcttacgtgccacttccaccatctctatgttcatagctcccaaacattcatctccaaacatactccttcgaagatcgaagttacggttcatgagttccttgaggttggagtaatctttcttaagcaatgcagttcgaccttcttcagctaattttgcaatttctgccattgatgatattataaactcatcaccgtctaaccaccttctacgaaccgtgctatgtaccttgccagagtcactaggattctcagcatagatgagatgcagaggaggaagaagattgatatccattatagtgtatatcccatatccaactttatccatatgctctttactaaaatccatgtgaacaagaccaccaccatagacttgagcaacacggtcttgaagaccagcaacaataccaagttctttctccgcattaagaataaggttaggtcggacttcgattctgattacctgcccgggcggcc

SEQ ID NO: 808 - DNA, 618 bp, Arabidopsis thaliana
ccacgcgtccgcgagctctcctcaaagccctaattttctcctcttcttcttcattctctcaccatgaagctcgtcaggtttttgatgaaattgaacaacgaaacagtttcaatcgagcttaagaacggaaccattgttcatggaaccattactggtgtagatgttagcatgaacactcatttaaaagctgtgaaactcactctgaaagggaagaatccagttacattagaccacttaagtgtcaggggaaacaacattcgctattatattcttccggacagtttgaatctggagactttgctggttgaagacactccaagaatcaaacccaaaaagccaactgcaggtaagattccagcaggtcggggacgtggtcgtggaagaggtcgtggacgtggccgtggtggtcgttaagcattttgcagtaatcaaaagtctggtcctttttggtttgtaacagcaggattgtaaaagatctatcttgtagtgagatttggtgtcactaagacaaattcttgttatctctttaagttttcatgaatttgagatttgaaacgttattgccaaacatacatcactcaatatgttttattattgacttgatcactttattaaaaa

SEQ ID NO: 809 - DNA, 618 bp, Arabidopsis thaliana
  misc_feature (1)...(618): n = A,T,C or G
gcaaggtcagcagataagcacgccatgcacctcctccatgatctctaccttcactccatgtctcaacttcatcaccggaagcagcggcggttccgtcactcccaccgccggctgctgcgactccttgaagacgttgaccaacactggcatgggctgtgcttgcctcatcctcactgctaacgnnncgctgnctactggcttcatcaatcggactctggcgcttgctctacctcgagcctgcaaaatgggcggtgtacctattcaatgtcaagctgcggggactcctctaccagctccaggtcaggttccatttttgattgctccaccacctcaggtgtctgcttttagcccgggagcgtccaaggcggcggggacaacaccaacacaggcacctgcaccggatactcccgcggatggaccaacgggacccacaactaaatcaggaattcgacccgtagatcagcccatgcaacccaccggcctcgctcaatcttctacttctccatttctcccgttgcttttcatatctcttatcctgttgaacttataagcccaatcgacgtgtaaagtctttaacctgttatgcatgtgttgtcagatattttcattaaaaaaaaa

SEQ ID NO: 810 - DNA, 618 bp, Arabidopsis thaliana
taattcaatgcagagccagcagttctatgactctggtctactcaactcaactcctaaagtttcaagcatcagtgtagccaagacagaaacttcttccatagatgcttccataagaagcagctcgtcgagagatgcagaccggtcagaggaaatgtcggtaagcaatgcgagtgatgttgacaacgaatgggtggagcaagatgagcctggcgtttatatcaccattaaagttttaccaggtgggaaaagagagcttcgaagagtcagattcagccgagagagattcggggagatgcacgcgagattatggtgggaagagaacagggcaaggatacatgaacaatacttgtgatcataaatctaagagttttgttttttcctcattctctcggtatacagtctttttttccagctcaagtaaattcttccacaggtactcattgtgcctcccagaaatctcaaaatatcaattgtgggatatgttttaaggaggtttcttattttcttccttcaaaaaaatttgagaaagcttggaaaagataagatgttgtctcctttgctcaatatgtgtatccttaattagttctttaaaaaaatacgttcttcaaaaaaaaaaaa

SEQ ID NO: 811 - DNA, 618 bp, Arabidopsis thaliana
agctagctttgccatctccctaaaggcaataaatctcggatccactttcacgatattttgatattttttctatttataatctttctgggttttgagtcttttgaaggctgaattgctctgaaatctcaattgtataatcatctcctgggtcgtcgttatcgtgatcatctagaagaaagcatgactacactagatttgaccagagccgagcttgctcttattgttctctatttgaacaaagctgaggctagagataagatatgcagagctatccaatatggttccaaatttttgagcggtggccaacctggtactgctcaaactgtcgacaaaaacaccagcttggcgagaaaagttttccgtcttttcaagtttgtcaatgattttcacggtcttatcagccccgtgcctaaagggactccacttcctcttgtcttactcgggaagtcgaagaatgcgctcttgtctacctttttgtttcttgatcaaatcgtctggcttggtagatccggcatatacaagaacaaagaacgaactgaattgcttggacgtatatcacttttctgctggctgggatcatccgtttgtacctgcccgggcggccgctcgattctggcg

SEQ ID NO: 812 - DNA, 618 bp, Arabidopsis thaliana
ccacgcgtccgcctttacttgcagtgtcactatagttgttgcttacctcatgaagaaacacggtatgactttagctcaagcattgcaacatgttaaaagcaaaagacccgtggcaagtcctaatgctggtttcatcagacaattacaagacctcgagaagtctatgcaaggtatgccttactataatatcttgaggtctagactattaggttgagatctctgtggtgaatctaagttggagatactttgtctgtctgattcagtagtgagtgaccagtttttttccttttgaggatgaaaagcaagtggttgtggaggagaagacagttccatgtaaatatctcttacatgcatcttccttcttctctataaaacagggaagcaagttacgattgcacaatgtcaggcgtgaagatcattgatcgtaccattgggagaaacttgtaaatctcacacgaagcatcaatcaaaatgttttgttgtttcttctccttaacaactcgaataataacatggaaacgaatttggaatatgttcatgttctctattcgttttgtatagtttcatcatcatggatataaaagtgaacataaataaaaatttgtaaaaaaaaaaaaa

SEQ ID NO: 813 - DNA, 618 bp, Arabidopsis thaliana
cgaattttttctccgcccaagagacaaaaatccttcgcaatcgagcaacggaagctcctgcatccaccgtccaaatctcttctaacgtcgccggagatcggtaaaccggttcttcatcccgtattcatctcttattgagatcgttggggaagtagagaatggcgacgtttgagctgtacaggagatcgacgatcgggatgtgtctgacggagactttggacgagatggttcagagcggtacgctgagccctgagctagctatccaagtccttgttcaatttgacaagtccatgactgaagctctggagagccaagtgaagaccaaggtgtccatcaagggacacctgcacacttacaggttctgtgacaatgtctggaccttcatattacaggacgcaatgttcaagagtgacgatcgtcaagagaatgtgagccgggtgaagatagtggcatgtgattccaagctgctcacacagtgagatgcaaattgtctgcagggaatttactttcctttgtactagattttgagttttttcactttgtaaactcagcacttgctatatatgttgagcacttgctatatgttgagctccatctgcagccatcaatttagcctat

SEQ ID NO: 814 - DNA, 618 bp, Arabidopsis thaliana
ccacgcgtccgcaacaagagcgtaaaccctagcagcagacacaacacgagttcatcgagaagcaagatgactttcaagcgaaggaacggtgggaggaacaagcacaacagaggacacgtcaacccaatcagatgctccaactgtggcaaatgttgccccaaggacaaggccattaagaggttcattgtgaggaacattgtggagcaggctgctattagagatgttcaggaagctagcgtctatgagggatacacattgccgaagctatatgcaaagacgcaatactgtgtctcctgtgctatccactctcatgtcgttagagtccgttcccgcaccaaccgcagggttcgtactcctccacctcgtttcgccagacgcaaggaggatactcccaagcctgggcaaccaggacaggcacctcgtcctgctggacctggagctgcagctgcagctgcaccgcgtgtctgaagccttcaagcagagctttctgtcttgttttcctatgttcttgttacgtctttaaggatgtttgtctctgtttaacatagttttgccatgtggatcttgaattctgtcaaactatttcaatagttgattcaacttgtttttttttttgtt

SEQ ID NO: 815 - DNA, 618 bp, Arabidopsis thaliana
cttttttttttttttttttttgacctcgaaaggcaaactttattgatggcaaatccaaaagttcgaaaagtgcttttaaaattcggtgttgagaagaagaaacaacagatgtttttggcttatagaaaacatgagcatcacgagtcacagatgattagttaattctcgagtagcggagttcttttagtttgaagagagctgagcaacgagctgcgtgagattatcttccttcttgatactctccacccaattggcattgatatgtaccctttcaatgctctgcttcaaggttcttgccatcgaaggctttgatcttgttgcaaaaaactcctccacttctttggctttctcaaacgacgcaaacggcgatacaactgcacttatgaagcgtgttatgagaaatccggagccccatgtgtttcctatatactcccacttttcctgtagccatttccaagctacttcacgtccttcccaacttacaccggaaagtccataaagtgcatcttgattacggacctcatcagacaatacgaagttaagaacatcttgaactatagtggggtctgggcaagatgctaaagaacctaagattcgtgttttctcttggctcaggtc

SEQ ID NO: 816 - DNA, 618 bp, Arabidopsis thaliana
ttttaaggatgcaaaagcatattcaatagtaaattcaagatcatacgattctcttaaacaagggagcataagattccggaaaaagaagagaggcaaacacaaaaatcctgctgacacattaagactaaagttgagaattcatcaaaacaaagggaagcaacagactagtagaatcctcctccagactccagcttaagccacaagggtgctcgcggtagtggattcgtacttccagacgggagggagcttcttggtcttcttgtaatagcgagcgaggcggtgaatcctgctctcaaccaagatgagcctgaacttggaatccttgtccttcctgttcctctcgagatgtttacggatggcaacagccttcttaattagatggtacagatcctcagggatctcaggagcaaggccatgagctttgagtatcctcaagatcttgcttccagtaacactcttgacctgagggataccgtgagagtcacggagaatcacaccaatctgggaaggggtcaatccctttttggcaaatttgcagattgattcatcaacatcctgagaggtggtcttgagccagcttggagacgatctcttgtaaggcaacgcagaggctgaaat

SEQ ID NO: 817 - DNA, 618 bp, Arabidopsis thaliana
gtcaaaaccatctctttctgctgattcatcttccttatcattccgatctgttctcaagtgcccaactaacacttcctcacctccttcacgagcttcctctgtttcaccactccaagcgtctcttcgtgagctcagagaccgtatcgattcagtcaaaaacactcaaaagatcaccgaagctatgaagcttgtcgctgcagctaaagtcaggagagctcaagaagctgttgtcaatggacgaccattctcagaaaccctagttgaagttctttacaacatcaacgaacagcttcaaaccgatgatgtcgatgttcccttaaccaaagtcagaccggttaagaaagtagctctcgttgtcgtcaccggtgatcgtggattatgtggtggattcaacaatttcatcattaagaaagcagaggcaagaatcaaagagcttaaaggtctaggtcttgaatacacagtcattagcgtgggcaagaagggaaattcttatttcctccgtcgcccgtacatccccgtcgacaaatacctagaagccggaactttacctacggctaaagaagctcaagctgtggctgatgatgtcttctctctgtttataagtgaagaagtcgacaa

SEQ ID NO: 818 - DNA, 617 bp, Arabidopsis thaliana
  misc_feature (1)...(617): n = A,T,C or G
ccacgcgtccgcacgccattgtccgtaatcacagaggccttcgaagatctcgcggatctggtgaaaccgcaacgatctgatgagatcgatgaagacgaattaaggcttgatgatttctgcagtgcgtgtactcacgtctctgttctcttcaattgtcttggattcgctttcaaatttgcggaaatggagtacatcgccaaggttaaggatttggtggaagcgtcgaaaacgttcgaaacgttacacaacattcttgacctagacgtggagaaagaaacggttaaaacaccggggagccattcgcgtaacctaagacgtgtgagacanggtttagatctgatccgagccatctttgaacaatttttgatcgcagatgactattcgttgaaagacgctgcgacaacggcttacacggaagtgtgtgcaccnnnccatacgtgggccgttagaaccgcggtttacgccggaatgtatacacttccgacgagggatcaacttctcttacggctcaatgaaactgatcaatcggttgagaagaacatgaggaggtacatggaagcatngcgacctatcatagaatatattgacaagctttacattgaaaggaatattaaact

SEQ ID NO: 819 - DNA, 617 bp, Arabidopsis thaliana
atgtctccgagaagcttctcagagatctcgaagacattattcacggttcatccacgccgccggagacgtggattcagatttctcggcggatccttcaccctaatctccctttctcttttcaccagatgatgtattacggttgctacaaggatttcggacccgacccacccgcttggatacccgacccgaaggttgcttctttaactaacgtaggcaagttattagaaaagcgaggcaaagagtttttaggtggaaattacaagaatccagtttcgagtttctccagttttcaagagttctctgtatcaaatcctgaggtgtattggaaaactgtattggatgagttaaacatattgttctctgtggtgattcatagagatatcaaatcaagtaacattcttttggattctgagatgcgtgggaggcttggggacttcggtctagctaagttatatgagcacggtggggctccaaacacgactcgcgtggtgggcacgttagggtatttggctccggagcttgcgtctgcttcggcgcctacggaggcgagtgatgtgtatagttttggtgtggtggtgttggaggttgttagtgggaggagaccgatagagtacctg

SEQ ID NO: 820 - DNA, 617 bp, Arabidopsis thaliana
  misc_feature (1)...(617): n = A,T,C or G
tttttttttttttttttttgatttgtaaatcttaaatctttcttctctttgggcagtataacataatctgattcgaataattaagatagtatcttttccaattcgaacctatatctacgaaaccaagcaaaatacttctgaaatacaaaactataaagggtggagggaatgttgaatcttgagatcgtttcaggtggattcaagagtcttgaagatttaggtttcttgagcaagaaggaacattttcgaacatggaagcaggtaaagtcttggacacaaatccgacggagaacacaaccgtggcagagcttggatccgattccatggcggtgattggtagccaaaggaaagcttctttagcttggattccacggacgtctttaacagatccgtaactgagttttccggcgatattcttgccgtagaaaacgagttgatcggagaacttgacgtagcaactggaaatcaggtcaacggtgaaatcgccgtcgtcggagatagtgtacgatttgnngttgttgggaagangacctttcgggaatnnntagcgtgggagaagatcgtggatgtcatcggcggcgagagatggacggtcgagatttagagtagagaagaga

SEQ ID NO: 821 - DNA, 617 bp, Arabidopsis thaliana
ctttttttttttttttcagataaagatgatgataataaaacccataaacatatatagtacagacgaaaaagttgatattttagacatttttattaaagttaaaacaagaagaagaaagaaacagacatgaaaacataaacaggtgctgaagcatacgaatctttgtttagcccatggcatacttctgagtccagtttcttgcagtagcctcgtatttggctctgtcggttttgtacatgtgtgcaatctctggtaccaaagggtcatctggatttggatctgttaacagcgaacatatcgagagcaacaccttggaaatggtgagggcagggctccattgttctttcaaaatgtcaaggcaaatgcttccgttgctgttgatattagggtgaaacaccttcgtcctaaatgcaacctttggtggtttgaatggatagtccggagggaagtgaatggtaacgagaaacacaccgcctgaatacggactctctgcaggacccataattgtagcttgccaatgaaacatgtcttcagcaactggacctgcactgcaggaggttggagggtctttctggagatccttcagctccttcaagatccgtttcgaagccattttc

SEQ ID NO: 822 - DNA, 617 bp, Arabidopsis thaliana
tgtttaatacatacagtacattgataaaccatacacatagtcataccataaaccattagtgaaatgcagtacaaaaacaaggtttagataacagagcccgtttgaggcccaataagcccaagaacctcatcccaaagaccatgactttggacagctgaaccaagctcaacaacagtggagctacaagcagcaacagtccaataccctcccaagatctctgcttttaactgctctttttcccaaccacaatacccatcaaagaatctaagctcacttcttccaaccaaattcctcttcaccatctctgcagccaatcctacactctctctcgttccatagtacaatcctttcatcacttgtctgaatactccgctcttaccaacctcgttgtctccaccactccttggactcaccaagaacaacccttcttccaaaggtccaccaaagaagagtcttttgtctgaaaacgttcctgccatgtctaatatcgttgacttggtctccttaatagacatcagagatggacggtttaggatgactcctataggacctgagggtccaacagagaggaggaggatcaccgtcttttcgaagatgtggacaccgtctagcttctc

SEQ ID NO: 823 - DNA, 617 bp, Arabidopsis thaliana
tatttacaactgtctctgttccatatcttcgatctgagtatggaaaagaatatgaatttgacgcacctgtcaagctattggagaaacatcttcatgcaatggctcaatccgtggacgagcagcttgttgtagtttcacaggttcttgtttctgacattaacattggttatgaagagattgtcaacacccaggttgtcgcctttaatggcaaacctgtgaaaaacttgaaaggtttagctgggatggtggagaattgtgaggatgaatatatgaagtttaatctggattatgatcagattgttgttctggacactaagacagcaaaggaagcaacattagatattctgaccacacattgcataccttctgctatgtctgatgatctcaagactgaagaaagaaactgaaacagaaggaaccataaccagaaggagagaaagagagatttttgtccatggaaggacataaaagcaaatacagtcatggaaagacaaagagaagctcaaaccataatttgatttttcttgattctgttttgtatttggaaaaatatgcaagaagaaatacgttggttattttttctctcatttattttctttgaagtttgaacttggtag

SEQ ID NO: 824 - DNA, 616 bp, Arabidopsis thaliana
aagcccttaaatgtgcagatgtgaaggtaagctctgagaatggtaatgttggttctgataacacaaagcaaagtgaaaaacgagcattgctgcctgcaaatattgacaaacaagatgatgggcttacccttagcggacggaaaatccccagctacatggccccgactgcatctgcaaaggccagagtcaaaggagaagcctctccgaggtttgcccaagcgaagactgagataaatggggcattacggcgccattcactgccttctccagccaatggtaagctgagtactactactatgtctccaagggctcaaaaacttctcttagcctctgccaaaggatctatgaacggcgacaaatcttttacttcttccaaggacataactcacaagtcaaccagaaccgactggaaacggtgaaggctcaggcaaaagagagtgtcatctactcatcttacatggtcgaattcaattacttagtgtgtttcctctgcattttggtttggtttggtgagtttagagagtgtttggtcagtgttcatgtctagtctattacatcattttcatatcttgcttcaatttactctgatatgtttgaagacacaaaatagttgaag

SEQ ID NO: 825 - DNA, 616 bp, Arabidopsis thaliana
ctgcttgagagagtcagagagtcaagagagaaaaggggtcgagaatggcggtcgcaatatctgggagtagtttgatatcgtcgactcttcagcattataataatcggatttatatccgagattatccgattccgtgtcactcttctaatccaatttgcaattcttttaatttcaaaagacgttcgttctctccttcttcccccaaatttaacgaccatgtcgttaacccttcctcttcttatttatcctccaagctttctccaattcgaacccattcctctttcgctgcgtgtggctgctcctggattcaagacaattcaatggttcatgattatgctacaacaactaatgggacgtccaagcgttgctcggcgttaccaacaacaaacacagtggatgtctcttcggtgtcagatctttttgaattcatatgctcgggtcctctcgtaaacaagattggtatcactcctcaaagagttggccagtctattgacaaatggttactctacggctcacaactttgtagactgtttcagcttaatgagcttaagcttacaattcctcagaaagctaggctataccactactacatacccgtttttatttggtgcgaaga

SEQ ID NO: 826 - DNA, 616 bp, Arabidopsis thaliana
ccacgcgtccgacatggagtgcaatctttaccagcttatgaaggatcgccctaagcattttgcagaatctgatatccgaaattggtgcttccaggtcttccaaggcctttcttatatgcatcagcgtggatacttccaccgtgatcttaagccagaaaatctattggtctcgaaagatgtcattaagattgctgatcttggcctggcccgggagatcgactcgagtccaccttatacagaatatgtctctacacgctggtatagggcacctgaagtactgctacaatcatatgtatacacgtcaaaagttgatatgtgggcgatgggtgctattatggcggagctgttgtctcttcgccctctctttcctggagctagtgaagcggatgagatatacaaaatctgcagtgtcataggcagcccaaccgaagagacctggttggaggggctgaaccttgccagcgttatcaattaccaattccctcagtttcccggtgtacatttatcaagtgtgatgccatatgctagtgcggatgcggttaaccttattgagcgcctttgctcgtgggatccctgcaatagaccgactactgcagaggctctacagcatccgttc

SEQ ID NO: 827 - DNA, 616 bp, Arabidopsis thaliana
agtagaaatgatattatattgcttaagttgaagtgtttatttgtataacattttcacagccaaccagaaaacaatttctagtcaccggaatcttttactggaaacaacaaccataacatatatatcttacaaacaacttttcatctttgatattaaaccgatgcaacatttccatctttgatcttaaaccgatgcaaccggaagatcattcgaaccggtatcaaccctaaacacattcttgcttgaaggcaaaccagctactggttcatcttcaattccacattcattagttcctctccttatcatgaaataaccatcatcaccccagcctctgttccattgatttgccatcaaccaataatcttctccttcactgctagttccccaaccaataagtttaacagcatgacctccaatgttagaacctgttatgtgcttatagactccagatttgtaatgagcaaaatcctaaccaaagcaaaccattaatgatacatctttctttaacttctattcaaaaacaatcttaggatttaagttttattacctcataaacggtaaaagagacttcaacaggtccattcttataaacctctgccatgatatcttgtggatt

SEQ ID NO: 828 - DNA, 616 bp, Arabidopsis thaliana
ccacgcgtccgtatggtgttaatgatccagttgctatgaagttgcttggcaaagctggtgagatgggcactttggaatcgccagacgatgaaagcatcaaaaccctttacgtcggtggacttaactcgagaattctcgagcaggacatacgagaccaattctacgctcatggagaaattgaatctatcagaatcttggccgataaagcctgtgcatttgtcacatacacaagccgtgaaggtgcagagaaggctgcgcaagagctctccaacaggctagtcatcaacggtcagaggctaaaactcacatggggaagacccaaacctgatcaagatggtgcaaaccaacagggcggtgtggctcatagtgggttactacctcgagccgttatatctcagcagcacaatcaacccccaccaatgcagcagtactatatgcacccaccaccagctaaccaagacaaaccttattacccatcaatggacccacagagaatgggtgcagtcatttcaacccaagaggctggtggttcaagcactgagaacaacggagcttcatcttcttcttacatgatgcctccacaccagtcatacccaccaccaccatatggatatat

SEQ ID NO: 829 - DNA, 616 bp, Arabidopsis thaliana
ttttttttttttttttcctgggaaattttgttcttattgagagcaacctttatcaaagagttatagcaaaatggatttttctcagcttcaaagcctccgtttcagggataaactggaaaaaaaattgattcaagagagaatcatgaaaactaaaaacggaggggattacacaatcttcaagttattgttactctccttcatgggtaatagcctgtgaaggtgaatcctctgccggcgatttcacctgcgcaataccatgcaaagcattcgagaccaaacaatgcagcgattcctgcatcttctaccttcagaccggatctgttcttccataggttctttgcgtagtctacttccttccagaaggtttcatagcgtccgggaatgctagcaagacgggtgtagagcaactgcttagacaactcttggcacttctcaacagtggcaggttcctggatatactgcttgttcttctccaacagctgtctgtagtaggaagttccatgcttagccacaaactttgaagcctcacatgcctttgattgaacttgtatcaacttcgatgccatcttcacaaccaaatccttcctgcagttttgataatgcagcaccggtgagc

SEQ ID NO: 830 - DNA, 616 bp, Arabidopsis thaliana
tttttttttttcagcaagaaaacataatggtcatattagtcatgacaaaaaacacttgggtttaagctttttgttatgacttgcaaggacactcaacaatagccacgcgaaagaaaaataatccaaaagaaaaaaaaaagagttgaagagagaatctgagacaagaagagctaatacacatccacttcaataattcattcaccattgtcaaacggttacagctttctacaacttcagctcgatcacgacttacacatcatgcttcactgctgttgctgctggtatccaccaggctgctggtagtttccatagccgcccccagcataaccaccgtagtaggcgttagggtcctgaggaggaggtgcatatccgtatgcttcatatccttgaggaggatacccatagtatcctccaccaccaccatactgggcttgatcaggttgagtctgtttgttggaaggactgcgaccccatgaaagacgaatgctttgtcccccaagttgtgttccgttcaacacagaaagtgcttgctcagcacatgccctattggcgtattgaacaaatccgcaacgttttcctgcgggtattttcacatgaactagttcaccaaattgac

SEQ ID NO: 831 - DNA, 616 bp, Arabidopsis thaliana
acaatctcgaggttagctcaatggagaattgaaaattttggtccttgttctttcaaaaagtccgatcctttcaaagtcggaatttggaattggcatctgtctatagagaggaatcgctatctatcagtgaggctattcccagaactttctcgagtatctaaagagcaacctcctgttgccaaatttgttcttcgtgtctccaacgttggccccaatcgtagattctacatctctcctgtttatgagaagctgctgcgtacaactgatgattgtgtgtggcatgttgactccagtttccacggtcgattcaccattgatgttgagtttcttgatctcaaaatctgccctgtgaatggtggtgaagcttctcctgtttggccaaccgatgcaacaatgcaatcaatctctactcaaaccactctcaaatgcttatcccggatgctagaggaaagcatactaaccgatgtaatcatccacacagccgatggaacactctctgctcacaaagctatcctctcagctagctcaactgttttcaaaagcatgttccaccacgacctcatggaaaaggaatcatccacaatccacatagacgacatgtcgagagaatcttgca

SEQ ID NO: 832 - DNA, 615 bp, Arabidopsis thaliana
ttttttttttttttttttttttcataaactgaatatattagatctggtgcaaaactaaaaaatggctgacaaaacaaaacaatgtcaaaacaagaaagaaagataagtgaagagagaagagtgggctactctatagctccattcaacgtctgcctccaccaccacccatcttagcagccttgggtgcagcactcttggggatatttcccttcacttgtgacttctgttgctttgatgcatactcgaccttctttgccttcttctcgtccttggtcttcttgattctctccttgatctcacgtagggcagcttctctagcggcatcacgaacttcaggcttctctgctcgcttcttctgaataacctccaaagtagcaccgacaatcgaccttgagtaaggcttcttagttgcacgtctccttctcttcacagcctcttgtgctgcgtccttcttgtgctgctttcggtacatagcagtccagcaaagcttagatggcttcaacttgttgtggaaatacctcttacatttggagttgagaaacaaaaacacctgagagtccgatcggataaatctgatccctctaccagggtaaattttctggccactgaatcggc

SEQ ID NO: 833 - DNA, 615 bp, Arabidopsis thaliana
ggcaggttaggtttcattttagcggcagacgagagagctaaagcaaggagcaaccctaaccatggcgacacaaccagctactgaatctgtgcaatgcttcggaaggaagaagaccgcagtggccgtcactcactgcaagcgtggatctggtttgatcaagctcaacggttgcccaatcgagcttttccagccagagatcctccgattcaagatcttcgagccggttcttctcctcggaaagcaccgtttcgcaggtgtgaacatgaggatccgtgtcaacggtggtggtcacacatcccaggtttacgccatccgtcagagtatcgcgaaggctcttgttgcgtactaccagaagtatgtggatgagcagtcgaagaaggagattaaagatatcttggtgaggtatgataggactctgcttgtggcggatccgaggaggtgtgagccgaagaagtttggtggtcgtggtgctcgttctcgttaccagaagagttaccgttaaacaaagctggttttttttttttttttcaatttcgattcatctcaaggtttttggagtttttgattatggacttgtgagactcttagaatttctgttttatgatttattggata

SEQ ID NO: 834 - DNA, 615 bp, Arabidopsis thaliana
ttttttataagcccattccgcggcgtcaacggttaatttgaaattgtcggagcttgaacaaggaaccgggattatctcgacacctgtccgccacctcaagtctctatcaaatgcggcatagtacggggagggaatgaggaaaacgtcgccgggatccgcaaggcagaacatgattgtttcattggctccggtggctcctccgctcataaccaccctctccggatcaaaagtcactcttccacctctagcttttcccatgaaatgtgcaattgcctgtctaaacttcttaagaccatggtagtcttggaaattagcgatgtcgctaaactgatgaataccttcaagggtgcaaatagaagcttctgggttctctttgacccaatctttgatcaaatctaagcaaagctgattctctgcaagacccatttggatgatcccatgggggttacgggaaagatgaaaaggatctttgtcgtaagctttccatccatcaaagtactctgagttctctccgtgttgattgttagtcgctatcttcgacaaaactgcacctttattttttcccggaagacccatttgctgtgtcaattctcacttctttgtagctgacctgcc

SEQ ID NO: 835 - DNA, 615 bp, Arabidopsis thaliana
tttttttagatatcttcttcttcaccatttaaaaacggtttacaagggaaactaaccaaccaataattgaatatgaactcatctatacaacaatttccttctatatagacctatgtctaatttgcaagtaacaaaacttcaaaacggtgcaaaaatgtggtaagtccacactctctactcaagaagaggtctgaggatgttgaagcctaacaatttcatgagctttcacaacttctgatgtgaattttctcagtgccccgaaaatgggaactaaaccagcttttaagctgctcgaagacgcgttgttcacaagcttaatggtttctttacccttacctctctcctcgactagcctcttcctcattgaatctaaatccactttcaaatcatccaaagctgatatcccgctctctgaccgacctttcgaaaccacacttctctctgactctgcatctcgctgctcagattgcgcttttaccctttgctcttcttcttgcttctcccatagctcgtgtaggcttgaagcaaaaccttgcattgcattggtcacattctctccagatattctacacattgcttcttgccaatctttgcaaatgataaagatgggcggtg

SEQ ID NO: 836 - DNA, 615 bp, Arabidopsis thaliana
tttttttttaatcaaaaatctcacgagtttatgaaatcattaaaaacaatctgaacaaaaaatacgctttcaaatgaaaactcaacattttgttcccaagactcaaatcaaacagtgacacgcacaatggtttcttctcttagtatgatgcttcagagtttttccagcccccataggactcctcgtccatacccctgcttcggttttccgagggcttgaaggagagagccacccaaatctctcctttgtactcttcatctttcaccacattgtatgcagttggtggaatacttccttccacgaaaaccggctccaacggaatagttgcttcaccaaccgcatcatcctctgtaccgacatctttgtcgaagattttcgcttttaactctgtagttccttcagacacagtgaagataaatgtctcattccattccggagttgtccccattccttctgcaacgttgctcttctgatcttgagtccgacaagtgagttgcacataaggatccatgttattcagaaaatctgcgtcctcgagacctttggcgctgacaagaacaacttcaagagttccatgaggcatttttttttggttttttctcttgtgatcttttt

SEQ ID NO: 837 - DNA, 614 bp, Arabidopsis thaliana
tggctgaatgatattacaacttgggttctcgtttttatgatattaattcagaatcagacacagtctcagaccataatttattcctcaatttatacctaaattttcagaccatcgaaatttaacttgagttcaaaacttttatcgatactgccaagtgtaactaagttaggatagctgagagagacacactccatttcgtgctttaatccccacgttgtccagaaagactcgatgagagaatctcaatcttgttccatctcctcacgtgagtcgttacaccaagatgatttggggatacacgaggaacaaaaaattagttgatgcgttgaatctgttcgacgaaatgcctgagagagagatgtaaggagatgaatgtagttgctgtgaagctaggttcaagggtcgattcctttgtggctaattctgtggttgtgatgttcagtggaaacatgaacgacgccgtttcagtgttcatagataattggaggaagaaccttgtctcgtggagttcatccatcgtgggtttctacaaaaaggaagaaagctttttggttacttgtcaagcggaccaaatcatatctagaaagattaaacactacacttgtaaggtatat

SEQ ID NO: 838 - DNA, 614 bp, Arabidopsis thaliana
  misc_feature (1)...(614): n = A,T,C or G
agaaaacaaacaactttattatcatctagaaattacagtacaaaggaagatttgttccaatcttagcataatcaaacatcattaaaagatcatctggagacgctgttgacaagcctagcaccaaccttatcaagcttcttcacagaagcaacagatttcaaatgaccaactttccaaaacgcttccaccatcttctctccaatcacttgacccttctcctccgaatcaatcaccgcaactgctgttggtccagctccgctaattgtacatccaaacgctccannntccaaanntgccttcttcacannntccatccccggaatcaaaggcgctctagttggctccacaatcttatccgacgacaatgccttcccaagcatcactgcgtcaccttctaacacagcagcgactaaagcagctgcttggctactgttccaaacatgatgaaccattggaatctctgtaggcaatgcagctctcattttcttagttggagcttcaaactcagggcttactagaacaaagaagagatctttatcagatgggaacttcaatggtttcaaatcaagtggttcgtagtttcgaatcaaaacgaatccacccatgatcgctgg

SEQ ID NO: 839 - DNA, 614 bp, Arabidopsis thaliana
cttttttttttttttttttttttttttaaacagataggcagcttcttatttagttataggtgcttggccaggagctgtggtggccgaggaccaactatggcaaacacagaaggtgatggcattacaactgagacaaagacagacacgaatcgacgtagataagactaaggcgaggcgagattgagttttacattggtttagtcttcccaccattgatgaacaaacacacctctggctctcagagtttgaagcatgttgatgcagtctgacttgtggttggaacagcggaggaaaagctcatccacgtagcatatgactcctgtttccagtaaaacagttaggaacttcatttccacttggtttgtgttcatcttaaggactacaaagtctgcgtatttcgcagtttcctcaaaccaagcaaggaaatcgaatctctcatcttctggaaatggttctagctgttcaagcggagttatctttttccctgtcgagttgttctcagccaaatccggatggtaaacaaaggtgacgccgggtttcttgacataggatagcattactgaagtgttgtggtcgacaaagtagacattgaatgctttgctgtcgagtgggta

SEQ ID NO: 840 - DNA, 614 bp, Arabidopsis thaliana
ccaaactttaagttgcactaacaagtaacaaataagaccgttttttaaatgatgaaacaagaaaaactaaaaaaaaacattagtctctctttctctctgtctgagtcttaaaaatgcataagctgctaaagagaacaaacaaagcgaaaacgagacaacatccaacaacatacatcacagagcttcttctaatgttttctttttcctgcaacactcttttgtaaacgattgaatagggaagagagatcttggatgttggttttacctatatgattcaggacgttttggtttgctctgtatcacttgctcaatcttgtccagaacaataggggtcaacaatgggatcacatcaacagctttcatattttcttgaatctgtgactcccttgtggcaccagtgataacagatgacacattaggatttgaagcacaccatgcgattgcaagctgagccaaggttacacctagctcatctgcaatgggtttgagaccgctaactttcctcagcacgtcatccacaagtgatctattggcaaggtttttgtagttctccaatgcaaatcggctgtctgagggaatagctcccttgttgtatttaccagtgaggcggccgc

SEQ ID NO: 841 - DNA, 614 bp, Arabidopsis thaliana
  misc_feature (1)...(614): n = A,T,C or G
gattgcagatccagaaatgggcgaaatttcagaagaagagctttgtcaaatgaaagctttcctattgctctcactgagatgcaccggtcatgttggggaagttccaactatggtggaagtggctaaagaactaaagagtattcaaagatgtcttcacaatgacactttttctccttcagttgaaacccaattcgactctcatcaagacatttcttcctcggtaatcctctcaaaccaaactaaagacactagggcattgctaagatgtattgcctgccacgtatttgacgaaatgtttcaatgggttatgatgaattggtttcgttttttcagaagaaatcgaagaatatgctgaaaataacttcggttcttgttttttttattcagacattatcaatcgcaaagctttagtttctttacctttgtcagatcttgttgggaaaaatgaccaaagagattaagatggcaccgagacaactagaaaggcaagcatatataagtatttttgtgtatttgtgaagagaacagaacaagagtagttaactttgtaactcttttannncttacttcagatgattacaaatgccaagcacttctaacaaaaaaaaaaaaaa

SEQ ID NO: 842 - DNA, 614 bp, Arabidopsis thaliana
ttgtgataacgggactgatatttaatcagctttcatgctgcaaactaactcacattttacaaattgatttggatgggaagctaaaatgcaacggaagggtgacaactttatgctaaaacacccatttcctttgatcatcaaactacatgcttaagcgccaaaccaaaggtctttgcacggagaaaaagttttaaaagttacaaagctggtgtttgatagatatggaatgcaaactgatcatgtttatgtttttattttcgcttatgcagaggcaagctgacacagtgaattgtgatatgattccgacgaggtcaacataagtgtgttggcacaccgaattatattatgcaatgaaggaaaaatagttgagttggatagcttttgaatgcgtctcatgatcatgctgcggttggctgagctgaagatggacatgttcgttcgaggtatctctcatgtctagaccatttgtgagaagagaattcttgtttgcgattttcacaccctcgacctctgaaaccttttcatgtagttccatgttctgttggtgcattaggtttactttcttgtggaggtctaaattctcttggtgaacgagattcccctctcggttaagt

SEQ ID NO: 843 - DNA, 614 bp, Arabidopsis thaliana
ccacgcgtccgcgagatctaaagccgagtgagacaatcgtgcggcggtggtgggacgtatgggatggaaatcatagctaggaacgatcacttctttcttagagtccaatccattatcgccgatcacctgcttcttctggtgatcatcgccgtcatgattgttcatcagatcgatgaaatcagtggaaggtagagatgaagaagaagatagatccattatctgcttatccataaactgacaagtattcatcgatccacccgacaatttctccgactcccgaatttcttcttttctttctaaaacccctcagatcgatttttatttttttatttttattttatttatgtcataaaattgaccaagttgctcatgtcgacgtaccttctgattggcgtagaaggttatggaccctaaatgggccgaaatgtatttagaattcagtttccatcctctccgtttaaagcccaaattgtgatcaatgacctgtaccaacactgacataataagtaaatggtataatcaataatgtgatcaaagcaatgggaccaaccttatttgtaatagtatgaaataacacggaaagaaaaggaaaaaaaaaaaaaaaaaaaaaaaaa

SEQ ID NO: 844 - DNA, 614 bp, Arabidopsis thaliana
cttttttttttttttttttttttttttttttttttgaaaactcaatttctttccatcaagataaaaggaaatctctacacattcatttctctcaatcgaactcaaatgattgcatctcaaaactcgctcagttcagttacacgcaaacaaacactctcggtttctaataatattacagagacaagaaaaatggaaacagataagcttggatcagaagaaaaaacagagtttattgtttagtgctttgtgattctttcaagtacttggaagtagtcggggaaggttttcctggtgcaaccaggatcgttgatggtgattggaacatcagcacaagctgcaagagagaatgccattgccattctatgatcatcatatgtatcaatctctgccgttttcacctttttgggcggagttatcacacaataatctgaaccttcttccactgtagctcccagttttctaagctctgtgcaaatggcaatcatcctttctgtctcctttactctccagctagccacatctctaatggtggttggaccgtcagcaaagagagcaacgacggcaagggtcatggctacatcaggcattttgttcatgttgacatcaatagcccg

SEQ ID NO: 845 - DNA, 614 bp, Arabidopsis thaliana
ttctaatctcttataacaacaccgcaaaagagtaaagggacgctagagagagctcgaagacgcaatggcgagaatcaaggttcatgagctgagggagaaatcaaaagctgatctttcgggtcagttgaaggaatttaaggcagagcttgctctccttcgtgtcgctaaggtcactggaggtgctcctaataagctctctaagatcaaggtggtgaggaagtcgattgctcaggtgttgacagtgatctcacagaaacaaaagtctgctttgagagaggcatacaagaacaagaagcttttgcctcttgatcttcgtcccaagaagactagagccatcaggaggagactcactaagcatcaggcatcgttgaagacagagagggagaagaagaaagaaatgtactttccaataaggaagtatgctattaaggtgtaagcttttatcttgatcacatcaatttttgtgtttgaatttgagctcgtgtgagtttttgctttgttttccttccttgttaaagatattaaaagctcatcttaatgaaagattgattcagaaaaacagtattgttatattattggatcatagcatcttttatattaaaaaaaaaaaaaaa

SEQ ID NO: 846 - DNA, 613 bp, Arabidopsis thaliana
ttttttttttttttttggttcattaaggtctcttatagatgaaaaaaattcgatagacaaaaaccacctcagaactatcaaaacccaagaaacaaggttgcaaacaaaaatgtaggaccagaaacgataaaatacattcttttgaagcggttttggaacaagtgtctaagagtcagcaatagtgacctcgacctcaacaccgggctcaatggtgatagacgtgatttgcttaacaacgtcaggggagctgaagagatcgatgacacgcttgtgaaccctgagctcaaacctgtcccaagtattggtaccttcaccacaaggtgcctttctggtagtgatcttaagaaccttagtgggcattctcactggtcccttaactctaagtctcttatccttagctccacggaccaaatcagtgcacactttttccaagttcttcacattttttgaagagagagtgatcctgatcttatgaatctgctccagaggagcctccaaaccagctttcgtgggcttcatcggttcatacgccatgttttgttacacctctttatcactcgtttttaagccgggagaggattttttgcggttgtgaatttgtgcggacgcgtgg

SEQ ID NO: 847 - DNA, 613 bp, Arabidopsis thaliana
  misc_feature (1)...(613): n = A,T,C or G
atgcttataaacacagattgcttatgtaatctcatcgtctagtgtcttgaagacatgggaatatcagatcagatcaaatgtctctctggaccaaaaaaaaagtaaannaccaatgattaactcttatatataacaaaaaccagatgtacatttataaagctttgagactctctgtctgaaataaaagtttcnnnaaagactcttcagtgcatcatcttctcttgcttactgcatccaaatgtcaaggcagatgaaatctcagagcttttaatcacacgcagtctcttcacagatgaaacaaacatttgccatggaacatccccaacaagcatcttgtccccttcattgtcttcataggttaaagtaaattctcctttcccatctaataatccaatgatagatttctcttctccttgaccatcagagatatctctttgagctgcgagtagacctctgaagagtttgtcaacgacaaaagagagctgttcgtagctgttgtaagcattgagatcaactttacgaccaataggaacaccatccatgttgatcttgacaaacattccttccttcttggtttcaacttgtttttcaccatcatcactcttgttgattt

SEQ ID NO: 848 - DNA, 613 bp, Arabidopsis thaliana
  misc_feature (1)...(613): n = A,T,C or G
gttatgacaatgctttctatataactcgacatgtagaccgatcacacacaatttagaatacatnnnatacattacatactatcaaacaaaaatgttccaaaataatgaaaagaagatcacgcccaagctcttttcctaggggaaagatcagaagtcttgatatcatctattttagccgccattatgaaatcattcatgctcaaccctccnnnngaagaggtaaatagttcagctcgaacttgggtaggacttnncaagtgaagagaagggtaatgaccagaagcttcagcaaccttatggatcctgtttatgagttcaacaccgcacccaaaatccttcactttccacatacaccttattttcagaccacccgcttcattatccactatactccatcccaaaaccttgtggaggagagttctggcatcatcgccggacaaaggaggctgtgaagacgaaacaggggaacactgaagctgggagagagacaaaacagatgcgtttggtatcaaaatcttgtgctcagtgctttggcatcccaacactttatctccgaattgactcgctatctcctccgggtaagggtcacgagctccgaagtcaccaagaaaat

SEQ ID NO: 849 - DNA, 613 bp, Arabidopsis thaliana
ccacgcgtccggaactagggagaaatgactaatcccatgatcatggttatgctgttgttgtttcttgtgatgtcgactagagcagacgaagagctgattaagacagagtgtaatcacacagaataccaaaacgtatgcctcttctgtcttgaagccgatccaatctccttcaatatcgaccgtgctggacttgtcaacatcattatacactgtctcggatctcaacttgatgttcttatcaacaccgtcacgagtctaaagttgatgaaaggagagggtgaagcaaatgagaatgttctgaaagattgcgtcacaggctttgcgattgcacaattacgacttcaaggagccaacatcgatttgataacccttaattacgataaagcgtacgaattggtgaaaactgcgttaaactatcctcggacttgcgaagaaaatctccaaaaactcaagttcaaagattcatctgatgtttatgacgatatcttggcatatagccaactcacctctgttgctaagacgttgatccaccgtctctagatcaatatatatgtcgatctggttatcaaaaatatatttatgtcgatcgtttgctaccactaataaaataaaa

SEQ ID NO: 850 - DNA, 613 bp, Arabidopsis thaliana
cggccgctctctgtgtgcaatttcgaaatcgataaagacttcaactttcggttctaacaatgacaatttccgtatagtttgattttgtccacctctttcaccgattacctgatttcatcgctggcgttagtcatcaaatgggagctcgttgctcaaagttctcattctgcttgttcccttctcacttcaaatccgcttcagttctcgagtctcctgatatcgagaatggaggaaaagtgtggccgacttttaaggaattcaaattggagcagctgaaatctgcgaccggaggtttctcttcagacaacattgtatcagaacacggcgagaaagctccaaacgttgtctacagaggaaggcttgatgatggtcgtttgattgctgtcaaacgattcaatcgccttgcttgggctgatcatcgacagttcctggatgaagctaaagctgttgggagcttgaggagtgatagattagcaaatctgattggatgttgctttgaaggagaagagagattactagttgctgagtttatgcctcatgaaacgcttgcaaagcatcttttccactgggagaataatccgatgaaatgggcgatgagattaagagttgcatt

SEQ ID NO: 851 - DNA, 613 bp, Arabidopsis thaliana
ggatccttagcaggcttacttccatttgctgatgccaatgcagtcgtgcttgaaatggcaaatgaagttttacctgtagtgaaggcggtgcctgttctggctggggtgtgcgcaacagatccatttcgtcgtatggactatttcctgaagcagttggagtccattgggttcgttggtgtccagaactttccaactgttggtctctttgatggtaattttagacaaaatcttgaggagacaggaatgggatatggtcttgaagttgaaatgatctcagaagcgcacaaaatggggctgttgaccactccatatgctttcaacccaaaagaaggagaagaaatggcaaaagcgggagctgatatcatagtagcccacatgggtctaacgacatccggaaatattggggcgaaaaccgcagtttcagtggaagaaagcgttgttcgtgtacaagctattgcagatgctgctcgtagattcaacccagacattatcgtcctctgccacggaggtccgatatcgggtccagaagaggcagagtttgtgttgaagagaacacagggttgtgtccatggcttctacggagcatcaagcatggaaaggctacctgtagaac

SEQ ID NO: 852 - DNA, 613 bp, Arabidopsis thaliana
gaagctatggttctttacatatataaacattttacattgtattttgtatgtaatgttttgttcaaaggttgtatttttattgtctcaaagcccctaaaccaaagagtcaaaggaaagatctttattacactgacaccttatcaaactcagcagaagtcttgtccatgtccttgtccttggccacaacatctttgtaacggtaccaatgtgagaccaacaagaaataggccaagtttagagtcatcataccagcaaccaagaagtagaaatactccaatcttcccttgtttaaatcttccggaagccaacttcctcctgaaaatccctctgtggtatcgtgtaccgccgataacaaaaaggtgctgaggtaactcgccaatccgattccacaataatacagagaaccagcaaaacttcgcatgttctctggaaactgtttgtagtaaaactccatttgtccaactccagcgagggcgtccgcgatacccattagcactagctgaggaatcaaccacataccggacatcgaagagattgcgccttttcttggggccaaccctagcgtcggttttgtgagagctacctttcttctgtattgttctcggacgcgtgg

SEQ ID NO: 853 - DNA, 613 bp, Arabidopsis thaliana
gcggccgccttcactgatatcatcactagtaaacagctttttttctcatcaagtttgtttttttatttggtaaatgtgatcaaatcaattgcaactccataagaaaaagaagatacatagaggaaactctagatttgggagaatgatgtgacagtcttgaacccatgattttccggtaatggagcgtttccaggtcgaatcgatataatcgcctccagacctgcggcttttgcagctacggcttcttgataaacatctgtcacaaacattatctctgcaggatcatccactcccaatgtttcttttatctccttgtaacttctactttctttcttgtttccgattgtagtgtcgaaaaagccagatatatactttctcagatctccatagtctgtgttcccaaagagaagcttttgcgctaatcgactaccgctagaatatatgtaaaccttaattcctgaagaatgccatttctctaaagcatctgctacatcctcaaaaacaatagctttcagttcatcacactcaaaacctgttcgccatatgtgaccctgcaattcctttaaagcagtgatctttctatcagctcttatcattgcctctacgtttgaga

SEQ ID NO: 854 - DNA, 613 bp, Arabidopsis thaliana
cccataactcgagtactgacgtaatttgaatcagctccaagcaatttagcaagaccgaaatcagataactttgcgtcaaagttgtcatccatcagtatattgcttgattttatgtctctatgcaccacttttggctcaatagcttcgtgaagataagccagtgcctttgcagtgccaacaagaactttgatgcgagcctcccaagtgagatgccctttgtgaatcatgtctccatgaagccattgctctaagttcccattgttcatgtactcataaaccagcatcctatgtgttccttcaacgcaatatccaagaagccgaactaagttcttatgccggacatgtcctatagcttccacctcaactctgaaatctttatcagcttgacctggattgttgagcaactttttgacagccacaggggttttgttagtcaaagttccatggtaaacaactccataaccaccatctccgatgatactctctttggagaaatgattagtcgcgagttgaaggtcacggagagtgaaccaatgaccccaaccaatgtgagaaacctcaggaagacccaagagaggtgaaggagctgttgttgaaggagtacctcggccgc

SEQ ID NO: 855 - DNA, 613 bp, Arabidopsis thaliana
ccacgcgtccgaacgcaatcagagagagaagcgagacgagagacgataatgggaggagctttatcaactgtgtttggaagtggagaagatgcaacagctgcagggaccgaatctgagccaagtcgcgtcctaaagtttagctcttccgctcggtggcaacttcatttcaacgagatcaaagaatcaaacaaactgctggtggttgatttctcggcctcatggtgcggaccatgtaggatgattgagcctgcgattcatgccatggctgataagttcaatgatgttgatttcgtcaaattagatgttgatgaacttcctgatgtggctaaagagtttaatgtgacggcaatgcctacctttgtgctggtgaaaaggggtaaagaaattgaaagaatcattggtgccaaaaaggacgaacttgagaagaaagttagcaaactcagagcataatgagcattgttaacgccttaaccaatagtcttgtgtaaactcaataataaatggtatgtttatggggaatgtgatgttctatactctctgctaatgtaagaccttctgtgtgatgccatgattgattgaaatggtttgttgaaaaaaaaaaaaaaaaaaaaaa

SEQ ID NO: 856 - DNA, 613 bp, Arabidopsis thaliana
cctagctaacgtaccagaaaaaaggaagccaagcctagaaacactataaagataagacacaaaggaagtctgagaattgtgagtaaaaatgtgtttggaagttgtgtatcatgaagagaagacggagcttggtcggcaacaagcaccagggatgtgtccttattgcggcggaaaagtatcggcggtggatatagagacgaagtggttgttctgtttcttaccactttgtttcaaggtcaaacgcaaatactcatgttcttcgtgcgagcgtcatctcgtcttgtattattgaagaaacacgtagagagatgcgaaattgaagtaaagagaaaaaccaaaacagaaagaatgaagaaaagaaacagaggagaaactgaaaaagattgttttatctctttcatttatttggttgcttctcctctcaatgttgaggtttttgcagatttcctcttgtgacttctgattttgctagaaacgccctctcgtgttggtgagtggtgacattggtcaattttcattgagttctttatttctcgtctgagttttgtgcaatgtatataatttgttggatttgtttaataaagattgttattcttaagtgaaaaaaaaaaaa

SEQ ID NO: 857 - DNA, 613 bp, Arabidopsis thaliana
atttttttccccatcatcaatgtttcatatatttattgtttcctcattcagagaatttttttagttcgtatgaaaattttgaaatctctggctatgtgtcttaaacttccaccaaagaagaaaatttaaaattcaccggaccaatcaccgaccgaaacaaaaaattaaagttcaaacagctacaataatatgcttttaaggcaggttatgtatatgattaaaaagcaaatgaacacaattccaattgtgttttcgttcttctcatcttatttttttgctgctgtatttgttcctcacataccaatcttcttttgaaatttcgtaatctggtttaggaagatccatgtcatcatgacgtgaggggcaatcctgacacagtaaactgggaaacccgagtaaaatttcagaggtcctccttcttttaaggttttcatcgcacaatcgagcgaacctgtgtatggatactttccttgagcatccggttgcattttctgaatctgagttttgacaaagtcaaatggcagactgcaagccgcagcgcagaacccagaaacagcacttgctcctacgaccgtagacatctccccgaaaccaagattatccggacgcgtgg

SEQ ID NO: 858 - DNA, 612 bp, Arabidopsis thaliana
gagcgaaaaattctgaagcaacaaaaatccattttttttcttcttttcttaatacacaattaacgaagcagaggagcaatcaaaagcgagagttttgattcttcggcttccctctcgacgtcactttgatcatgagatttctcacaatgttcttcttcttcaacccaatgatccgtacgcagtcacgttttttcttgaaccgggtccatcctgattcatacctactggtttattcgataaccgacgtttataccgcttcaaaaccgaagccaaattctctttcccctttgggaaagccacatcacctgcagctgtaccggttcggccttttctacaagagattgccatttcaacgtctttgattagatcaagaagtgtgactgcggttgtgcatttgcctttagccggttttgcagccggaggtaacattccgttagctgaagtcggactcgctctctggtggctcgctggaatctgaaggcaaaagcacggtgtcattggtgtccgcagctttgagaacgccggatcaatcactccctgtaggcggttgagaacgtaagtgtactttccccaaagctcaggccgactctccatgagagacaagtcaaggac

SEQ ID NO: 859 - DNA, 612 bp, Arabidopsis thaliana
ggtactactgctaagatcatggttgctgcaaaagataacctcttggggaagtatatctacaaagacaccattgcaagaaacattgccgctgttatttacagagatgagaaagagattcaaaagacagcaattaagcagcatcgtgtcttgcgtacagccaccgagtttcgatatggctacaaacttgtagaaaacggaaacatgagagctgcacttagtacttcagatgttattgagctcccaacccaggaccagcttaaaacagtgttcgacaaagttaaagactactttggggatgcaaaagagtcattcggaaagctatcatcgctgaacccggggagtgacgaaaaaactgaagaaacctcggatgagaaagccaaggcctgaggctgaacaattgacacttggttggttgattttgatgtctcaaccgtctcggtatgggctgcagaaggtcactggatatgacgagactaccgctattttgtgcacattttctctatacatctctcacagaaacagcttctgttaaatctcttgtaacatataacttattgtgtattgtagatttgttgaaagaaagagccattggttacaaaaaaaaaaaaaaaa

SEQ ID NO: 860 - DNA, 612 bp, Arabidopsis thaliana
  misc_feature (1)...(612): n = A,T,C or G
ccacgcgtccgcttttagttgtgtgtttacctaatttaagtgttgtcttatctctataacttagattgtgttatgtagactttagcatatttgggcttggagtttgtttctcactggcacaagaatgatttatcatttggtagtcttgttagatgatcaattactcgcttagcttagttttcacaatcatacgaattagcttaagaagctctgcaaaatgtgcactcatctattctttagagctcaagttgaatgctttatgtggtctcttgtatctctgtacattttgttgtgctgaacaaaggtttgacggcagttagtgcatgtgtaagtaggcatatttttgtcagctgcatacgtaggttctagctacaaattggaattgtatgtgtttgaaaacgtaaaatcaattataaatgtttttgaaaatcatctatacaagcatggttatttggttcttgtttncttattttttcgggtaagngccacggataattggttagacattggttctaataatgtgggttttgttatctgtaatttctcgtcaaaatgatgtactgtatcattaaatgaatatcacttattgtacatgcttttaaaaaaaaaaaa

SEQ ID NO: 861 - DNA, 612 bp, Arabidopsis thaliana
gatgcccagtcgtcggagacatagctacaccgtcggatctcctgcaaccacatcttccaattacagtaacactactttcaccgatcgttccttcccgacaacccctgcccgtacatccaccgacacaaccacctccatcgctcgtcgcatctccggtatcttcatcaactgcttcactcctcccgattccgtttcctccaactacatcgacaattcaaagtcctcttccgacaataatatccgtagtagacgtagctcaacaggaagtagtagtgtacagaggagttatggaaatgcaaacgcaacagagcatacaagattcactttcgatgaaatctacgacgctactaagaacttctctccgtcctttaggatcggacaaggcggttttggcactgtttacaaggtcaaactccgagatggcaaaacctttgctgtaaaacgtgccaaaaagagtatgcatgacgaccgtcaaggtgcagatgcagagtttatgagtgagattcagacattagctcaagttactcatttgagtttggttaaatactatggatttgttgttcacaacgacgagaagattctcgttgtggagtatgtacctcggccgcgacc

SEQ ID NO: 862 - DNA, 612 bp, Arabidopsis thaliana
  misc_feature (1)...(612): n = A,T,C or G
ccacgcgtccgaactattttattcttaagacggttcacaacaaattcatttaaacttgtaattgttttataaattatctatatcaatctcgtccgacagttgacttagttgtaaccaccagaaaagtaagatgataatttatgtttatccatgttcattttcttattttggcggctcatcttctctttctgagtagtttagtgaaacagaagctgacaaacaaaaaatgaaaatgccnnnaaacacactagagcagaagactcctagttcaacttctcttgtgttaatgtgcctataaatatcctttgagatattcatagagtatcagaaataaaaaaaaatgtcttctgctactgcgacttataactacgatgtttttctgagtttcagaggacccgacactcgccgcaagttcatcagctttctctacaaagaacttgttggaagggacattcgaaccttcaaagacgacaaagagctagagaatggccagatgatttctccggagctcaaacgcgccatcgnnnagtccaaattcgccgtcgttgttgtctcagagaactacgctgcgtcttcttggtgtctcaatgagctcgtggagatcatgaaagt

SEQ ID NO: 863 - DNA, 611 bp, Arabidopsis thaliana
atgattaacctttaaaaccaaaatatgtacggcagtacaaatgatttactttatacaaaatacatgtattatataatcatataaaatatatatagttataaatataatcaaaaacggaagttatagattaaaaaaaagatttagaagacaatttccagagaaacatataaaacacttatcactaattttgtatttcccacaaaacgaaacaaggagcagagtgcagagaaatggataattgaaaggctctgtttttcggattccttcataccaattgttgtcttgtaacttccattctcttcaacaatccagcaatctcagcctccattctcagcttcatgttcctgtaatcgcagtgcgaattctcaagcttcttgagctcctccagcttattcctccttctctcctccgtctcctgcagacacagacgcgctagtttctctgtgtactcctcctccatcttctccgtcttcatttctatcattctcttgaaactctctgcctctattctggcctcgtctgctttcttctggaacattcttgtttcagcctccttgattctcaccatgctctctaaactatcaaaactgttcatcattgcatctgttaac

SEQ ID NO: 864 - DNA, 611 bp, Arabidopsis thaliana
aagatctctaacgcaacgctaacgcgtttcctctcgccgccactcactcctctagagtgccaattacctatgactctgtctgcacaatcttgaagaccaagttcaatgattgttccttcaacaatgtcgttgacttcttctttggtcaaatcacttgatagccttagatgagctgagtatgttattgtctccctcaccgttagtgttcccatcaaaatgtcctcttgtgttacataagcgacgagaccgtagtctagtcttgccttctttcagttcaatagaagattaccggtcataatcacgtttcttgcgagtctacctgcgagagaatcaagaagcgtggacttgccggatccggaaggacccataatggccataatccgacctggttcagcatggccgtttaagccgtcgagcaatcttcgagtcggaccaccactaaagtttggtataaccaccgtcaaatcttcccacgccaagtacgccccacggccaatctctgccggtggcggcggacgtcggccattgctcgtactctctaactccattgtttttgtttgatcttgaaaaagatcaaaaccttacttattagagagagagcggacgcgtgg

SEQ ID NO: 865 - DNA, 611 bp, Arabidopsis thaliana
  misc_feature (1)...(611): n = A,T,C or G
ttttggttaaacagataacgagaaaataaccaatcagagaacgaggtaaagaaacttacatattacaaaaggcatgaaaaaataattatcaaaaagaagatacaattggtaaccattttctacacacacatacatatatctaccattcacacgactggttctgaccgaaactgcatatgttcctcttgtttgtgacgacgactcagttatgttctcctcagacaacaaccgtacgatgcatttgatagctggtagagagttgttgcgagcaagaagtcgtcaagaagatatataacttgttgagtgcacaaacagctaagagcttaagtgttcatgaccttcctctgcagcatcaacatattcagaagtaggttcaaagtcagggtttgacaagttcactgtgaggtttctcatcaacagcaaaacagtttcgaaatttataggatccatttccttgagctttttcatgcggcctttgctgtcaggatcgaacacactcccaatgaagntataaacctcagcaaaatcaggaagaccatgcattgagggagcttgtttcgccagtctcaaacccttagaatctgatagtgttctgcttgagcttccgatac

SEQ ID NO: 866 - DNA, 611 bp, Arabidopsis thaliana
  misc_feature (1)...(611): n = A,T,C or G
ccacgcgtccgctcagaaattttcttaccccagttaaagactacacaactcagtatcatgtcatgtttctatcacaaattctacacacacaatcttgtatgttactgtgaccttatctcatttgctttgctcttttcagccattttggcaggtcataaattattcaagcagtcgaggaagaggggttgttggtgttctagaagctaattttgttgagccaacccataacaagcaggattttgagaaaactgttcttcttcagaagcttgaaaaccgtttaaaggaaatgacggtggagtattggagctgccattgtgtgttgattgggtatcaagtaaataagaagcctcgtcttcagatacctcaaaaagttcaacctgccggtagacaagcattaagtcctcctccaggcttccaagcagtttttccacaaggaaatacaacatctctccctagagtttcaactcagccagtgctgttggagaagaggaaagaacatcctgattctgttgcaagtgcagcgttaaaaaganaggttgggaatgatgacnttactgtcccggggcatattcgggttgaacagtttattcatggatcagcaagtcagtcac

SEQ ID NO: 867 - DNA, 611 bp, Arabidopsis thaliana
tcttttccggggaatgagactctgatacatagtaaagttttgcataggtagatttaaagcgaaagaaactcttttaagtatacagcgtttgccttatagatggtaagagtttctaaacagtgactgggattgcttcatcaagggcgatcacaccgggaagtacttttccttccaacagctccaagctggctccaccaccagtggagatgtgactcatgactcctgctactcctactttctccactgcagccactgagtctcctcctcctattatcgttgtcactcctttttcacttagctctgctagtttattcgctatcgcctctgttccagccgcaaacttttccatctcgaaaactcccataggtccattccaaatgactgtttgtgttgtgtccagagcttcgttgaaagttttgatagagtctggaccaatgtccagtcccatccatccgtcctcaatgcctgatgcaggcacaatcttgctgttggcatcaggagcaaacttgtcagcaactacaacatctgttggcaacaaaagagagactcctttggccttagctttggcaaggagttctgtagccaattcaagcttgtcttcttcaacaagg

SEQ ID NO: 868 - DNA, 611 bp, Arabidopsis thaliana
  misc_feature (1)...(611): n = A,T,C or G
tttcatcacacaacactggagctagagaacacaagtcacaacaaggaagcaaacactagaagaaaaacatctatcaaacaactatctgnnntctggagaagatcaaaactttttaagaagctatgaacgcaaatgaatgatgaaatcagctgcgtaatccattgttttgagacctcccaaggagagtaatacaatcgctagctcgtcttttccccattttcttagtccattgcttagactctttaacacttctgtatcgatctctgtcacccagagcggcaaacagctcaccattagactcaccaaaccggaaatatatgttcgccaagttgctgtttcacatcccactgatattttcccatctaaggcactcgcgatgaactccaagtggcttcccaagattgcttggcggcggcgtttggatgcagatgatcttgaatccacgccccaagtaagtgctccacataggaccacaaagtaggcaagggcatgacctcttagctctgcaactagatccgatggtccttgttctcggtctgatttgtcagttgatagaaaccaagatgggatcgtttctttgatgagaacgtggaccacacctaagccaccgg

SEQ ID NO: 869 - DNA, 611 bp, Arabidopsis thaliana
  misc_feature (1)...(611): n = A,T,C or G
cgcggccgcttacgtttcgcagtcacaagagattatccatgcataagacttcaaaaacaaaaacaaaaaggtaaaaacaaaatcgaaaggaatgaaaccaacgctcagaggtttatgcacatttgcttcaatgttcaccagttatctcctctcctttaaccatcttctccttatgccatttacagaatccttccaccaatgcgtccttcatccaagggtgcctgcaactctctaccgcttcttcaattgtcagccatttacgtgttctcgtctcatgttccggccacgtcgctagctcttctttcacatacaacgcgtacattgccgctttacataaaccttctgggctaaactcatcttggtgtgatttgctcttgaactcataattccccaaaaaatccataagaatcccacggactcctgcttcttccactgcttccctcgctgcagcctccctgactgtctcatcattctcccatcctcccttgggaaacaaaagtccaggtccactagacgagctgatcatcaacacnngaatcacnttnncagattcagaattaccatctttgtcagaatttacatacctaaacggaatacacccggcgacgaga

SEQ ID NO: 870 - DNA, 610 bp, Arabidopsis thaliana
  misc_feature (1)...(610): n = A,T,C or G
accaccactgtctagaacagattaaataataccaaatgcggtttagcacgatcggtttgggatcttcattagtgtctgaattcatttggcaacagaaagaacacattttttggtacatatattgaaggtacaaagcgattannngagcctataagaaaactcgagggtttgtgagtgtcattgtttgaattccaagaggtagcgaggatgatcacaatcaccactcactcatgacccgcacctatgaaattctcccccattgctgcaaatactgtaagatacaacagaacttgagaaatttgagcgagataacactggagatggacatttggaatgttctgtctgagttttttacggattgttcacgagtcttgcgcagagtcatcatcgacgttggctttttcatcaccaggaagaccaaatatccgtaggttacggtccatcgaaccgactgcaacgtactgtgcatctgaaccaaacttcacacacgtagctttaccagtgccggagagatctgggagtgtcttgataaggttccattcagctttcacacttgccgtctggtatactttgatatctgatgcagcaataccgagataagatccgctag

SEQ ID NO: 871 - DNA, 610 bp, Arabidopsis thaliana
tgcaaatttatgagattttgaggacaatcaatgtgcctaaatgatacaacagtggagaacaaaaatagtattctgagtaatcttccattgtaaactcatcatcgacgtttgtataaacaagcttttaactcaggccactttattatcttctgatttgaattcatctgctcctttttcttgaaatggaataagatgaacatcttattggagaagtcctgctcaaagaaccaaatgagtttctttcttatagtggaaatgaaaaaaagaagaagaaaagattgcacctttaaaaccgaagtaaatccaagatcacaaacggctttcacaaagtcttttgggtctgctcctccattgtttggatcaaacctgctctttacttccgctataagaagcataccacttggacgaagaactcgatgtgcttctttgatataactagaatagtttgttcccattaatgaaagacagaaaactgcaacatccactgatgaagactcaagtgaagtatttgacatcgcaggcaataacagaggggttctttgagacaagatcaaaggagaaaactttgttcttcacacttttagcaatccttgcatcaccacagccaaaa

SEQ ID NO: 872 - DNA, 610 bp, Arabidopsis thaliana
aagcttttagttctgctctccaaattttccacttatttaagcaaaacaaaaagaatgtcactagccagtattattcatagagatatccgaatttttttttagtttcataagaagaggcatggatttaaagaactccaaagaaagggttgttgatggcggagttgagttctgttccagctgagtttatgatggctgaatcgatcttgtctctaggtaagaacaagaactctcctccttcaattttctcaaatccacatagctccatgaactctatgccccctcttagcgaaccaaccctttcctgaaatgtttggttggtgagtctaattttccggaatttttcctcatctggattcttagcgacatttcccatgtaagtcagcagagtctggaacgctctcttcactttagcatcatcctccttgtgggcttgcttaagggacctcaagcattctctcatttgttcagtctttgtggccggtctaattggcaatgtaaccttcttctcctccacaactggcactgagggttttgcagctgcagttgcaggatcttccggaggcaatccgagttttcgccttctttcagccttgtcttctcggacgcgtgg

SEQ ID NO: 873 - DNA, 610 bp, Arabidopsis thaliana
cttcttcttcttcgtcttcttccctgcaaatctagtttctagatcttttctttcttccgcgaaacgaaaatgagagagtgcatttcgatccacattggtcaggccggtatccaggtcggaaatgcttgctgggagctttactgtcttgaacatggcattcagcctgatggccagatgccgagtgacaagactgttggcggaggtgacgatgctttcaacaccttcttcagtgagaccggtgcagggaagcacgtcccacgtgctgtctttgttgatcttgagccaactgtgatcgatgaggtcaggactggtacttaccgtcagcttttccaccctgagcaactcatcagcggtaaagaagacgcagctaacaatttcgcccgtgggcattacaccattgggaaagagattgttgatctgtgcttggaccgtatcagaaagctcgctgataactgtactggtctccaaggattcctcgtcttcaacgctgttggtggagggactggatctggtcttggatctctcctccttgagagactttctgttgactacgggaaaaagtccaagttgggtttcacagtttacccatctccacaggtctccacctctg

SEQ ID NO: 874 - DNA, 610 bp, Arabidopsis thaliana
  misc_feature (1)...(610): n = A,T,C or G
ccacgcgtccggactgatcagattaggagtaatttgtcgatcatttcttgtggatggtttggtaggatgattctatatgcgaattatatcgtatcggttttcacttcgttgctttggattcatccgttggcagaggttttagtgaagagaagtggtgatcctgggactagtggtagtagtcagagtcagagtgggttggttggtaatgtaggcatgttgagtgatgattttgcgaagtttcgggttttgtgtttgttactttcgggtttactacaagcgatggcggttcgtcctaaccttcagatgttcttgaacgaagcagtcctttcgtggtatcagagattacatggaagtaaaactcctgatttggattttagtcgtgcaaagatgtttcttcacaaccattacctatgccttgttgctctgcagtttttggcgccttcggtgctagtgattcttttcctcggcttgtctcagattgacttgagctcttttgctgtatctcaactggtatgtggttctttgccttgtagcgatttcantaaacaagttggtttgttgatgtcttggtgggttctttttgtttggtcgggttttacttcagcgagtc

SEQ ID NO: 875 - DNA, 610 bp, Arabidopsis thaliana
tacctcgagcggccgcccgggcaggtctcctgttcaagactcctttattttctcttatgttcaaagagatgaatctgaatctgaagcaaatgggcaacatgatctatgaagatccaacaaggatccaagaagaagaagacattgttcaagaagtttcaacaacattctctgaggaagaagataactcatcatcttgttcattatcttcttccatgtgttctgattttacagaggatgatgatgatgatgatgtttcttcatcttcttcaaatggacctcttgaagatctctctgacctcatgtcacacctccctatcaagaggggattatcaaagttctatgaaggaaaatctcaatcattcacatcactagcaaatgttaaaggccttgaagatcttatgaagagagggtttaataaaaatagaaactatggagcaaaaagaaagtcatctaggagtactggagggattttagatcaaagctacaaaagggtttttagtcctaaagctacaatctccaagaaacccaacagaacaccttcctctgctctctcttgtctatccagaagaagacattagatctcagacaaacattagtttttctttccaag

SEQ ID NO: 876 - DNA, 610 bp, Arabidopsis thaliana
tttttcatgtaatctacttcaaaatttacgccaaaagaacacgaaatttacatgcgctgtaacaaaaaagttacccaatcatgaaagcaagaatcgaagagaaaaattatttaaaaagcaaaaagaaaacagtaagaaaaaggaaagggaataatggaacaaaaatgaaaaaaaattggaaggatgaaattaatcgaaagcagctcatccgattcccctgaggcgattatggtgtctcctccttctcactctcgctcttagtagtagtctttcttctccgatcgccgactaacctccggagctttcttcggcggtctctcctctctgttttctacttgaggtttctctcttctcttactttttttattctttgtgcatatctctcttctcttactttactcaccaaatttctaggaatactttttctcctgagatttgggcttttaatttagcttaattcttctgttaagtagaaatatatcatggcgaatctatgaaattatttcttctgttaagtagacattgaaatttgttacaatggcgaatcgtgttttttttttggtctgtctccattttttggtattgtctctaagaaaatacggacgcgtgg

SEQ ID NO: 877 - DNA, 610 bp, Arabidopsis thaliana
ggccgccgaaatttcacggtaggtatttgaaatggcgacagttccaggacaattgatctgggagatcgtgaagaacaacaactgtttcttggtgaagcagttcggtagaggaaactctaaggttcaattcagcaaggagactaacaacctcaccaacgttcactcttacaagcactctggtcttgcaaacaaaaagactgtgaccatccaggccgctgacaaggaccaagctgttgtgctcgccaccaccaagaccaagaagcagaacaagcctaagctctctgtcaacaagtctatcctcaagaaggaattccccaggatgtcaaaggctgttgctaaccaggtggtggacaactactacaggccggacttgaagaaagctgcacttgctagactcagcgccatcagcaaaggtctcagggttgccaagtccggtgccaagcaaagaaacagacaagcttaagcttcttctttcacaatctgttttttttgaagtaaaagattttgttgaacaggttttatttaagttgttgctttgaagttgaaccataatgctattctcctttttcattatccttattataaaggagttagaagtttatcttgttaa

SEQ ID NO: 878 - DNA, 610 bp, Arabidopsis thaliana
ttttttttttttttttagagagaagatttgaattcttaacgagacaaaagtaaacaaaacctttcaaagattcagacaagaacaacccttaaatcttaatccatcccagactcaataaaatagtaaaaatgtgccagcaattaaggtcaaatggaacacaaaattcaacaagatatcgtcatcatcttactccattagtacccaaaattgatcatcataatgcagaacttgaatatctgctatctaccgtacccaacctccttcaatgttgtggattcctccaacgagaccatcatcgataaaatctcctcctcgcttcaccttatcctctgtaggcttcaccggatagtcccccgtgaagcatgcatagcagaagcttctagaatcttcccccaaatgtttctttaacgtctcaaacgacaaaaacgcaagggaatcacatccgatgtaatccctgatttcatcaacactcatcctattcgatatcaactcatttgagctaggcgtgtccactccgtagtaacaagatgcaataataggaggactcgcgatcctcatgtgaacctctttcgcacccgcttctctcaataaacgcacaatcttggacgaa

SEQ ID NO: 879 - DNA, 610 bp, Arabidopsis thaliana
acgcatgtggtatgctcggagatgctttcaagaactatatccgaacacgcgactactgcactacgacaaagcacatcattcacatgtgtatgaatgcgattcttgtcagcatcgaaatgggtcagtttactcatgttacaagctatgtgaacaaggcagagcagaatcctgaaacccttgaacctatggttaatgcaaaactgcgatgtgcatctggattggctcatttggagttgaagaagtacaagctagctgctcgtaagttcttagatgttaacccagaacttggaaattcctataatgaagtcattgctcctcaagatattgccacctatggtggactctgtgccctggcaagctttgatcgatcagaattgaagcaaaaagtcattgacaatatcaacttccggaatttcttggagctagtgcctgatgtgagggaacttatcaacgatttctattcaagccgctatgcttcctgcctggaatatcttgcaagtctcaaatcgaatctgctgctggacatccatcttcatgatcacgttgacacactatatgatcagataaggaagaaggcactgatccagtacctgcccgggcggccgctcga

SEQ ID NO: 880 - DNA, 610 bp, Arabidopsis thaliana
tcaaccatgcagtttcaggttctggaaacataatactgttatttgatcatatcatcatatccaaattctcagcatcatcacagctggataattctttaagataaaacaaataggagaaatggaaactctaggcaccaatcacggaaccagagttcttcctgcactcggacaacatgtccatgtagaactgacatttgctaatctcgcttccatagctgccgatgcaatcttggaaagccttagcatgaatgtcacaggtgctagaaagcatggcgcttccagcaggggctgcagatgcagaagcagcctcaacagcctcatgctgaatggttcgtggacccatcacagaatcaacagccctgtgtgcaactgcacttccagtaccaaaagccataccctgagcaatggttgaaccaatgcctgagaacatgccaccaccaccaccgctggcctgagctggagctggaggaggtgcacggtgtacaggttgaggagctgggctgcgtgcagcagcaggacgagggcgaggggcagatcttcctcctgagctacggcgacccattttgatatagagagagacggcggtgaaacgaaaatgagattgcggccg

SEQ ID NO: 881 - DNA, 609 bp, Arabidopsis thaliana
  misc_feature (1)...(609): n = A,T,C or G
ctttttttttttttttttttgaactccatctgagatttgattaaatacactggattacaacaaggagaaaagagagaaaaactttaaaagatctctctaatcctaattaaactcactttacataacttttatgcaattaattattgccataataaaacaaaaattagtgttaattaaggaagaaacgtaggaatggtagtagaagagtgttggtgatgttgatgacgatgagcttgatctttcatctccgccgtagaagcatgaccacaccggtcacatctcaccggcgtaagaatcctgcgacaagaaggacaagaagacctagaaactagccatttgtcaatacactccacgtggaaagaatgaccacaaagaggaagcactcttatttcttcaccgtcggcgaagtcagtgaggcaaatagcacattccgtcgagtctccctcttcagcggcggcgnnnnnggttgattccgcggcggtgaaagtggatcttggaagagactgaagagctttctttttcaagcntttgttcggtgacgncgaatctcctccggctgtaaaccgccggagccaagcgcatcgtacgacggcggcgagaccagcaacg

SEQ ID NO: 882 - DNA, 609 bp, Arabidopsis thaliana
ccacgcgtccgatcttatttgacaacatcttgatatctaaagacgagaaggttgctgaaacttacagacaaagcacttggaagcccaagtttgatgtggagaaagagaaacaaaaggcagaggatgaagctgctggtgaggcagatggtctcaagagttaccagaagaaggtgttcgacctcttgtacaaggttgcagacatttctttccttagtgcgtacaagtcaaagattatggaacttattgagaaagctgaaacacagccaaacttaaccatcggtgtgctcatttccatcgtgatcgtcttcctctctctcttcttcaagctcatatttggtggtgcaaaggctaaggtagaaaagaagaaaccggaaacagctgcagagacctcgacaagcgaggcaaagacagaggagaaagcagaagcggtggctgcaccacgaaagaggcagacgaggcgtgagagttagataaaaagaggattagattttgatttttggggctttttgttttgatttatcaccgtatagacaaacagtagtggacctgatattaagacgattattgtaacatgttttttttgtatgcttttagtttcacatgaaaaaa

SEQ ID NO: 883 - DNA, 609 bp, Arabidopsis thaliana
  misc_feature (1)...(609): n = A,T,C or G
ttttttttgatcaaaagagagcgaaaataagtctctggagtttagattgagaaactaaatgtcaacaaaccggaaacaaaaaaaaactgtgtcaagtaacaaaaacaaaagaaaagactcaaagagagtagcagcaacgtaagatttgattccaaagtgtctcacaagggaggaatgagtaatgctactccctgttttattcactcatcacaagtccatcaatcaatctatctctttactcttggacctctggctgcttctttccacctgctttcaagtaccaaccaatcgaaccgacaatagcaaccacacctgccacaaccgcatagtttctgttcttgtcttctgacacctttgggcccgactcagctgatgcagatgctgttgcaccagcaacctttgcttcgcttgctgaccctgctgcttgttctccaggaccctgtcgagctaactncngnagcttctcctgctccattttcttaatgaaaacattctcagcggctctctcctcttcgctaagaactttgccactagagaacctacgagacacaattctcaaagcatttcttgttgccatggtaatgaagaagtatcctggttcgatggtag

SEQ ID NO: 884 - DNA, 609 bp, Arabidopsis thaliana
tttttttaagaggaatcacacagacaacatttccattaaaaatgaaaacaaacatgaagaagacaaagttagtaagcaaattccacaatgataaaacaaaccctagctaggattcgctcgaaatcaaacaaacaagtgaaaaaaacacaaagaatctcttcttaaaaatttcaactttcaaaacataaaagattagatctcacttagcaaccatccttgctatgaaatcttcataccggatctttccatcggatccaacatccacctccttgatccactcatcgaactcattaggctccagcttctctccgatactggtcagaatatgcctcagatccgccacagcaacgaacccggtaccttccttatcgagcactttgaatgcgtcacggagctggcgatcgaaaggttccgtcttcagatgtttcgccatgagatcgaggaatctgttgaaatcaaacggtgaagagagattctcggatgcgattatggatttcagctgggcttgggtcgggtttccgccgagagatcgcatgaggatcccgagctctgacggtgcgattttgccgtcgccatcggtgtcgaagagcatgaaggcttccttcatcg

SEQ ID NO: 885 - DNA, 609 bp, Arabidopsis thaliana
  misc_feature (1)...(609): n = A,T,C or G
aagagagttattacaacttgaaaaacatggcatccaaggctttgattctgttgggtctcttcgcaattcttctggtggtctccgaagtttctgccgcaagacagtcgggcatggtgaagccagagagtgaggcaactgtgcaacctgaaggttatcacggaggacatggtggtcacggagggggaggccactacggaggaggaggccacgggcatggaggacacaacggaggagggggccacggacttgacggatacggaggaggacatggaggacactacggaggaggaggaggacactacggaggaggaggaggccacggtggtggtggacactacggaggtggaggacaccatggaggaggaggccacgggcttaacgaacctgttcagacgaaaccgggtgtttaaaagttaaaactataaaataaattcaccaccagtccaccatgcataattgcatctctatatacacttatgtcttataagtatgcatcaaaataaaccatnntnagtttgtaatgcagttccttcagaaatgtgtggaataatgttttataataataatagaatatctctcagtttgaattaaaaaaaaaaaaaaaagggc

SEQ ID NO: 886 - DNA, 609 bp, Arabidopsis thaliana
tttttttttttttttttttttttttttttttttttttttttttttttttttttttttaaacaaaagaggcaggctttattaaagttttcagttttttcaccatcgaacttacttagaaggtatttacaaagccaatgccttcaaaactacaaaggccttttttcgttaggaaacaacttaaaaggaactgcgccaccatttctactacgactcaaagtcctcaactccagaaaacatacaaacaacacttgagacgcagattgttcatactaaaaccatacgcgacaccaacccgatcgtgtttaggctgcctctgcaaacccgacctgttcgttaccaaagtcaaatacggtgtggtatttgcccatgaacacatctcccaagatccagagaggtccacgaggtggagcaacgtcaagagcaataaaaccactgatgcactgtgccacaggtccctcaccaactttcagaacatactcttctggagcaagatcaaatactttgcctccaatggtaagtgaaacagtgggcattgttgacagttgtgcacagtcaactgcagactctcccattgggctggggaggcgttcacatagctcgttgacgtag

SEQ ID NO: 887 - DNA, 609 bp, Arabidopsis thaliana
  misc_feature (1)...(609): n = A,T,C or G
tttttttttttaagaatgagcaaagagataaacttccataaccaaacttcaaatactcaaaatcaaaacataagttctcatgtctagcaccataaagatccactgacaacattccaaaatatccaaaacttgaaaattaaaaagcnattgaagataactctaaaagataanacctttcaagaagatttctttttcgttctcacttaatcaacgttctgcataacatcctcagaagtaaacttagtacccttctccttgtcagcagctgcacgtcccttagccttcctctccaaaagcgatttcctatctttatcaagacgaagcttcgttatcacaactttcgacggctgaatcccaacgttcacggtggttccattcaccttctctctggtaatcctctcgatgtgaatcacccacttgcgacggtaaacctgaacaactttgccttcacgtcccttgtaagtaccacgaacgatctgaacctcgtcgtctttacggatcggcatggatctgacattgtacttctgacgaagatcggtggagagaggagagctcattatcacacgcctctcgctggaggaagctgtgaaatgagccttcctgttcttc

SEQ ID NO: 888 - DNA, 609 bp, Arabidopsis thaliana
tttttttagccataaatattcaattttcttgaattaacaataaatgtactgtatcaatgaaacccaactatgaaactgaatgaaacatagggtcctttttttatatacacgaaacccaacagctgcattttttatgtatctagttatggcataaacaacaacattaaaaagcatctgataaatcccttcagagagatctcttctctcatgagccagagtcctcttgaagaagcaatgtttaggcaatgttctttctgccttgtgaccagaatggcgttgcgggtttacgctttaaggccttaacactaaatggactgttcttgctcaataaacaggttccttgatcaaggtcacaaaccgggtactcgtgagggcagcaactatagttgtcatcacagcaagtggctgcttctagtgggcaacatccccaagcaaagcaatacttgccatactcaaacagacaacaacaagtgttgctctcaggacaagtgtagtaactgtcacattgggttggaggcttgatgggagatggaggtgaaggtcccgggtttggcgggttttcgccattctttatcgggtatgaaggttcaatcgcgattccacattttc

SEQ ID NO: 889 - DNA, 609 bp, Arabidopsis thaliana
  misc_feature (1)...(609): n = A,T,C or G
cctctagagcggccgcccttttttttttttttttttttttttttttttttaaataaaattgtttctattgtgtattcaagattctggttatttttcttacacattaatagatacatccatttgaatatctccatctcctctgtatcaannnnnnatctctggccactttattggctaaactctgtatatatacaatatgatgctgataagacccgatttggcttttctgctttctcattccttagagggatcaatggttgtagtagaactcgaagaggtctcaatgacagattccgagattctagcttctgatttctcgttcgagtaagtcgaaagtatagtgacccaaataagctccacgcaatctacccagagaagtcgttgttctactgggaccaaaccgtatgtgatcaaatgagcaaatggccaaagcttccaacctgctgttagcataggcaagaacgtagcttttagttctttgaagatgctgataggcgattcgaaacgcaggaaaccaagaaccgtgaagtaaatactgttccatatagctgaccagactgtttgatcaaaggcaactttcacaggaaccacccaccaatcttgaaacgg

SEQ ID NO: 890 - DNA, 608 bp, Arabidopsis thaliana
  misc_feature (1)...(608): n = A,T,C or G
tttttttttttttttttttttttttttttttttttgaggtaaataaagtgacatttgcttattgagattgaccaaacatgtggtatactaatgtatttatgtttattgctttctaattacaattttattttatacccctccctattttacaagttagctttgccgttaaagagataaaatattgttgtccttagcatcccactccctgttgttccatggtctaaagccagttttacgcacggcttcaccgggtgctttttcttctcaaagcccgttcggtcttagaccatttccatatagaaaacggtacagccggtcattcaaggagcggttctttcctttagtcggtcactcatttctttacctaatccannnntttttgttttctcctcnttaacttcttcatttaagggcttcttgatttctgtatctaatccacctgtttttggtttctccttttcagcagcattcttcttagcttctgcctcgagttgttttccgttttcttcatgtgcacgattgaacagtcttacaaagtttagaagagtcgacactacttgttcaaaagggcacttggcagggtcttcaccaaaatagagaattaaacc

SEQ ID NO: 891 - DNA, 608 bp, Arabidopsis thaliana
  misc_feature (1)...(608): n = A,T,C or G
tcgaatattgcagcttctgcaaaatctggcatggacaaaaccaaagctaccttggaggaaaaggcggagaagatgaagacacgagaccctgttcagaaacagatggctacacaggttaaagaagataagatcaatcaagctgagatgcagaagagagaaacgcgtcagnnnaacgcggccatgaaagaagcggctggagccggaaccggtttaggtttggggacggccactcactcgaccactggacaagtcggacacggcactgggacacatcagatgtcggctctgcctggtcacggaacgggacaactgaccgaccgcgttgtggagggcacggctgtgaccgacccgattggaaggaacactggaactggtcggacaaccgctcataacactcacgttggtggtggtggtgccaccgggtacggaaccggcgggggatatactggataaacggtgttgttcacttgttctgttatttgctctgtttttgttgaatcgaaatttcgtggttttctgtcttactttcgtgttctgtttttttttttctttttcttgtgcttctgaataattgtaggacttcgatctcatctaggtttttgttgttg

SEQ ID NO: 892 - DNA, 608 bp, Arabidopsis thaliana
tttttttttttttcaaagagatcatatggcataaatataaccacgatggtgatcacatcatccaaatggaatgttatacgtataagaaagtggaacataaagaaatgtattttattaaataaatgagggaagaacttaggactacgtatgtacattgtacaggaagtgaaagtgaaagtgatgatgaggctgggaagagaagtaaaagccagtaaagatacgtttctggatccggtatgagtccgaatcgccccattgtgggttttggtgcgagtgcgaatcgcttcatagtggcttcatttaagcagacactgcagctgcagcctgttcttcgttcgccggttggagagtgcacaccagattacggtctccatacacgttgtccactcgccctgtagtgggccagaacttggaggagcggaccatggagcggggaaggctgcgtattcacgggaatacggctttttccatgtatctgccattagcaatgacggaggatgtggagcacccttcagaacgttgttgtttggatctgcgtttcgtttctcaatctgtgaaatctcttccctgatcgagatgagagcatcacagaacctatctaactcagc

SEQ ID NO: 893 - DNA, 608 bp, Arabidopsis thaliana
ttttttttgagggaaaaaaacagaaaatgttcctcagtaccgtaccagcaatacatgaactgtgtatgtatcaattctcttattatacgatggaaaaagagagacaagaaacatcaaggttctaaaatgcttaaacaaacattcattcatcatcatcaaaaggagccattgataatttaccagacatcaggacgaagctctccagtagctggaggcatccaacgaccagaattgtacacgttttcaccgactttccatccaggaacatccttcatcacatccgcctcgtattctagatacttcttccactcagacacaaacctttcatcttcttcagcttgaagaattggtagaatcgctctacgagcagcgtatttctcttccttcaacgccctgcggattttgttgccctgaccgacttggtacatcccccaagcaaaagcacctgaaacggtaaggaaaatagccatggcgcttggacccgtgttggagatccggcgagcatatcggaccggtgcgaatccacccggtggtggaccatcctgaagcaacggcatatccttcacactcgccattcctggcttcttccttatcatcgcctccgtcat

SEQ ID NO: 894 - DNA, 608 bp, Arabidopsis thaliana
  misc_feature (1)...(608): n = A,T,C or G
ctttttttttttttttttttttttttttttttttttttttttttttattttttaagactaaaaaccatgtgaacaaatttataacaaacgaatagaaacaaatatcattcgcaaaccacatttatgtttccttgctctttctctattttacacacattcttccaatacaataattaaatatggttttacatacagaaaaatataaaatgtaatgttgtttgcattataagttctagagggacaaaaacacacttcttctttttttaccacaagcaatttcacttattacgtaacattaagcaagagagacttgagagcaacggcgatatatcataagacttacgaagaggaagaggaaggtacagttgaagggttgaaaggtttctgttctgcgcacnntagctcatcgtttggtcccgcgtcttctcttccaatacccatgaggtcaaggaagtataagtagtgtgagattatgttgttcattggatcaatggaaccttgaccacatgtgtactctccgtagaggacgttcatggtgctgccaaaagtcgggccacgcttggacaaagtgtcgttctttgtaggtttccagtttccgacaaagatgt

SEQ ID NO: 895 - DNA, 608 bp, Arabidopsis thaliana
ccacgcgtccgatctcgatcctgaatattacaaaacaaatcggttgacagagaagagtgatgtatatagttttgggattgtactgttggagatgatcacaaatcggccagtgatagaccaaagccgtgaaaagccatatatttcagaatgggtggggataatgcttacgaaaggagacatcattagcattatggatccaagtctaaatggagactatgattctggttctgtgtggaaagctgttgaactagcaatgtcttgtctgaatccttcttcaacgagaagacctaccatgtctcaagttcttattgcattaaacgaatgtttggtatctgaaaattcaaggggaggagcgagtagggacatggactcaaagagttccctagaggtaagcttgacatttgatactgatgtgagcccaacggctaggtagattacatgaaatattatcatgcggtatcacataaatttgtttatatgtttctatttacagaactatcctcaaatttttatctctcttctaggccacctttgttaatgaactctgaactttttgtcattgatacatgtgaataaaagttcaaagtctattattaaaaaaaaaaaaa

SEQ ID NO: 896 - DNA, 608 bp, Arabidopsis thaliana
gattttgaacgatgcgttgaggacgattgtgaatgctgagagacgaggaaaagcttcggtggagctcaaaccaatctccaccgttatgtcttcgttcttgagaatcatgaaggagaaaggttatatcaagaactttcaagtgtatgatccacatagagttgggagaataacagttgatctgcaagggagggttaatgactgcaaagctcttacctacaggcaagacgttagggcaaaagagattgagaaatacactgaacgcacacttccaacacgtcagtggggttatgttgtaatcacaactccggatgggattttggaccatgaagaagcaatcaaacggaatgtgggtggtcaggttcttggcttcttttactgaatagcttgagctagcacatggcaagaaccttctagtgtcaaaggattcaacaaaagattgaagtttcggtccttctcctgttgctttttgttttttgtaacttgcattgtctttgaacagattggcaattattagataacacatttgttgctaaattcaaagatcttgttgttagtttatattttggacgagaaatttgttcttccatagctatctgaataatctatat

SEQ ID NO: 897 - DNA, 608 bp, Arabidopsis thaliana
  misc_feature (1)...(608): n = A,T,C or G
tttttttttgctacaaacatttcatttgcagagattgagcaaatcaaagttacaaacttacaacaatacaaatgtgtatgtaaaacaaacaaaaggaacaatctttaagcattccttggatcactttctctttttcttttatacaaatcattacataaacattaaccaaactacactgtataaatgtaaaatcatctgtccacttcttggctctctatgaggtatttgaatgatgcagagaggttgttggatccagtggttgcggcggttgtgacagagtcaaagcatggttcagctgttgctctagccttctggctcgccatcttcgtctccatctcacaaactcaaccatcactgaacttccgcatatgcatacaccaaatccagcaaatgttgacagaagaactgacagaactggttgcaacttcaccacagagtaaaatatatgggcgaagagaacgaccaacgcaaactggacagatgcgtaaatccagacaaatcttctcattaccatggttgatgcggtcatggatgcaagaagancaagaatacaagnnnacggcagtgatatagcgatggcacctgtacccatattctcaaccaggagc

SEQ ID NO: 898 - DNA, 608 bp, Arabidopsis thaliana
tcgagcggccgcccgggcaggtggacaattggaaaagattaatagcaaatgggttctttaatgtcaggatgggactctcgagtaagggatcccaaatcagtgagaaggtgcaagtcgctcacaagagaagaaatcgacactttttggaaaacgaagaagaagaatgaagaagaagaacatgttcaagccttttccaagttggtaactcaggaaggtgcacaaagccaagcgaaagagaagaagagtgtagatgatctttttgagaaccaaagcaagagtagtggatggtggagaaaaacctactgggcgttcttgaatgagccgagggaggaagagggtcgaccgaacaactacgtgtcgcaattcaaagttgctcacatcgccaaaattgcgggctcgtaatgacgctataatcaccggctaatcacatatatatctcgtgtgaaatgcgattagtcgtctgccgttgtggtttaatcaccggctaatcacatatatagtatgttggccgtgttagtatgtgaatgtgtgagtagagcatgtaacaaagggtgtacgattttaatgtaagaatgtgttttactttatatgtgtcatgtatgtatttt

SEQ ID NO: 899 - DNA, 608 bp, Arabidopsis thaliana
  misc_feature (1)...(608): n = A,T,C or G
tttttttttttgaaagaccgtacctgctaaagaattgtgataaaaatggttttcggatcaaacaagcaaatgcatcatataacgagaaactactgaaaaagcaaagtttaagaacaaagatactcaaacaaactctttttattctttaaggtcctccaagtatggcattctcggtatcttctctactcaacgcatagctaaaccttctttccatgtctctctctagatttcccggcccacttttcatgtacctaatgcagagatcagtgacatcaagagatagttgagcatgccaatcaggtttctgaatcaaccaaacagctctatcgtctttactttggtaaaaccctaatttcctcagccacgcttcgatacaaggtaagctatgcgaatacagtggcttgttcttctctggtagcttcttcagccattcgtcctccgtatctgacacctcctccgcgtctgaagattttgaagatactagagttagaggcttcctccgaattgtggaagaagaagaagaagcgaaactacgacatctgngagaaannnaggcttttgagctcaaaatgtgaagaaatttcgcagggattgatgattgtgcacat

SEQ ID NO: 900 - DNA, 608 bp, Arabidopsis thaliana
  misc_feature (1)...(608): n = A,T,C or G
ctcataaattcgatacatccaacattcaaagcacatgacacgaactttgaggcgtnnntgtcacaagttaacatcaaacctagacatatagattttatttcaacaaactgattatttatacaatacttttatttcattctataagtagtgataccacatatttcaggttcaaggctcatgatcgacttgctacctctaatccgtttccatcaggatcaaagaagaaaacttgcttgacttttccatcaggaagagacttctgaaaagtttctatccctttctccttgagagaatgaaggaaagagtcgaaatttgggacagagaaacagatatgatgacccattgggagatggctaggatccttaaccgctgaggtagcactgtaaggaccttctggaagatttgttgaagggtttctctggataatatgcattgcaaaagcacctggtaagtttagccacaccacctgtaggtctccaaaatcaggactttcgatctcctcgaacccaaacacctctttgtaaaactgggcgaggcgtgtgatgtctgatgattctctggctatatggccaagactcgccatgtttggttccaagcggacgcggccg

SEQ ID NO: 901 - DNA, 607 bp, Arabidopsis thaliana
ttcttctaggctttagaagtgccacgatgatccttatcgatatgcttcaatagatccaccggatcacgaaaccctctactacatttgggacaaacatcaaccgtaactttgccacaattctgttttccattcctctcttgcgttttctctgaattgccatcattgccactcgcaaactgtaacttctggcttatatcgttaccgagtctactaatacttgcttccgcagaagcgaaaagactagaccatctcgaagaagatgatgatgatgcaggagcttcttttgtgtttgtactcaagaaacccatgaatgagaaactcgattcaggcttcttgggtccagaacaactatgatcaggtccaaaccgatgtttcaaacaatgatcgatgctacaatctcgacatttaatagtattggagaatgtcaagagttctctgcatctaggaacaggacatttcttcttcttgacagctttttcgtagttagatggatcacagtctgtattaacatgtttctcccaggtgatgttgggatcttcgtcagggtttaatctaactcctttagcacataatggacaaataaccacagtgacatctcctctgtttc

SEQ ID NO: 902 - DNA, 607 bp, Arabidopsis thaliana
  misc_feature (1)...(607): n = A,T,C or G
tatctcatattctttccttggttctccggtgaagtgtttactgattctggagacagagcatacatgactattatgggatgggtggtgacgagctcaggcgcannnnggaaacatgaatacattgnacnacctgatgtaatggttgtggtgatcccacatgtggtctttgttgttatccccagtgtcttggttgtgtgttgtctggttgctgagagagaaatctacaaagatcacattcgaactgtctctggtaagaaagaggatgaccatgaccggggaaggaagaagagatcacaacgccgctcactgttattctcgaacagaagactgtttcggaaatcggtcttgctggcttcattagctctatattggaagcatttcaagaattgctgggcattaggtagagcttatgagatgaatgtggttcattttccaggttacagccttgtagttccattgttgctactatatgttatctgcaaaacccataaagttccatgagatttgaatctatggaagttttggtgtttttatgattttgattatgaagaaacacatttatagggggttttcttatgtgttgtttgatagagttgatatactatat

SEQ ID NO: 903 - DNA, 607 bp, Arabidopsis thaliana
  misc_feature (1)...(607): n = A,T,C or G
taaagggttcctcaaagtttcaatctttctctctgaatctaaaccatggctcgttgtagcaacaatctcgtagggatactcaatttcctagtatttctnntctcgatcccaatcttagctggtggaatctggctaagccaaaaagggtcaacagagtgtgaaagattcctagacaaaccagtgattgctcttggtgttttccttatggttgtagcaatagctggtctaataggttcatgttgtagagtcacatggcttctttgggtttatctctttgtcatgttccttttgattctccttgtgttctgtataacagtttttgcctttgttgttactaacaaaggagctggtgaagctattgaaggaaaaggttataaagagtataaacttggtgattactctacttggttacagaaacgtgttgagaatggtaaaaattggaataagattaggagttgtcttgtggagagcaaagtttgttctaagcttgaagccaagtttgttaatgttcctgtcaatagtttctacaaggaacatcttactgctcttcagtctggttgctgcaaaccttcagatgaatgtggtttcgagtacctcggccgcgacc

SEQ ID NO: 904 - DNA, 607 bp, Arabidopsis thaliana
ggcttgctcatggaggcattccacaggaggtccaaaacctcctacttgaatatggagttgaaatatttgcggagatgctggttgaaggcttatctcgaataaaaagatgtactgatgaaggacgtgttctcatgtcattagatcttcaggttctaataaatgggttacagcactttgtgccaacaaaagtgaagccaaagttacagatagtcgaaacatttatcaaggcgtactatctgccagagacggaatatgttcactgggcaagggctcatccggaatatacaaaagcacaggtcgttggactggtgaatttagtagccaccatgaaaggttggaaaaggaaaacgcggctggaagttatcgagaagatcgaatcagcgtctatgtagatcaatcttagaagcttctggcagcttcgcgacatcaagtaatactctggtcttcttctgtctgttcttacttttgcatttgtatcgagtaatgtaaatttgaggataggccccccttcttggtagttttacctgttattacttataagtttgtctaaaagatcctcctgaagttgtatattcttgaagattgtaacacacaatttgtcctccat

SEQ ID NO: 905 - DNA, 607 bp, Arabidopsis thaliana
tttttttttttttttttgtcacaactgttttattatttatattacaaagccttttaacaagccatattttacaaagccatataacaggccataaacggacaaaagcccaaagaccaccttctgaagaagagaaagctaatgtgctaataagtcaaagcccacatggcactagagacacggtaaagaggacacgtggaaacagaagatgatgagttgcagaatgtcgcaggtggagaatcataaccacaaaaaacttccgttcaccggaattgctgtaaacgccaaatcggaagcagctacaaatccgatgagacaattgacaaatcttctgtgacaatgactgtaaaatttaaaaccttcaagaaagaaatagctcacaaactatcgacttcgacttctgccatttaaaggaaaaacaacataaacccaaacgattcaacaagcatcggcaacaagaaagacaaacaacagctctaatttcatcaaaatcaaacaaaagacactaaattaaacttcaatccgtaactaaaaatttgatcttttaaaatgaaaactcaataagcttgaagaacaaattaagccccttaaagaagggaggatcgaaaaa

SEQ ID NO: 906 - DNA, 607 bp, Arabidopsis thaliana
tttttttttaaacaaaagtttttttttttttatgtacacagaagctaaggctttatagagtaatgataacttttattgtcaaacactagacccacaaggaggcaaaaaaagaagaagaaattaatcctgaaaaatactgttgttctataaataaaatcagatgggtctcttcttcttcaagtagcaaaatcacggcgcttcacgaagatcgggtaccgtttctgcgttcttgtagttggaaagaaaaccagcttgtcttgctctgcaggaacccaactgaagcctgtcactaggcggtgaaggaaaacagagagtgcaaccctagccagctcgtaaccgggacatagccttggccctccaccaaacggtgtgaacacattagaagggcctgtcgttaccgagttgctctgccatctccaagggttgaaagtgcgagcatctttgaagtggtttgggtctaaatgaaccgctctaaacgatgagaatactttccacccttttggaattttataacctttgatctcaacatccgtcattgcacgtctgaaaacaccgccgatgatgttagccactcgtagcgtctcattaaccacacattgtgtgaatg

SEQ ID NO: 907 - DNA, 607 bp, Arabidopsis thaliana
gcggccgccaaagcttccgctgagaagttccatcacatgttcgccgggaaaccacaccatgtctctaaagcatctccaggaaacattcaaggttgtgatcttcacgaaggcgactggggtcaagtcggctctatcgtcttctggaactacgttcatgatagagaggcaaaggtggctaaggagaggattgaggcagtggagccgaataagaacttgatcacgtttagggttatcgacggtgatctgatgaaagagtacaagagcttcttgctcacgatccaggtgaccccgaagcttggaggccctggaagtattgtgcactggcaccttgagtatgagaaaataagcgaggaggtagctcatccggaaactctcctccaattctgtgtcgaggtctcgaaagagatcgacgaacatcttttggccgaggaatagaggagtactactactcttcgtgtttgaatttaaatgcaataaataaggactaagagccatgtctttgtgagatatatgaatgtgagtgtgcatcatgaatgtatgtatactaagatcgttttacgttggctactgtaactttgagaagcaatgtgtagtagctgtgatgaag

SEQ ID NO: 908 - DNA, 607 bp, Arabidopsis thaliana
ccgttgctgaaagatgagctcgatatcgtgattccgactatcagaaacctcgatttcctcgagatgtggaggccttttcttcagccttaccatctgatcatcgtccaggacggagatccatcgaagaagatccatgtccctgaaggttacgactacgagctctacaacaggaacgacattaaccgaatcctcggacctaaggcttcttgtatctcgtttaaggattctgcttgtcgatgctttgggtacatggtgtctaagaagaagtatatcttcaccattgatgacgattgcttcgttgccaaggatccatcaggcaaagcagtgaacgctcttgagcaacacatcaagaaccttctctgcccatcgcctccctttttcttcaacaccttgtatgatccttaccgtgaaggtgctgatttcgtccgtggataccctttcagtctccgtgaaggtgtttccactgctgtttcccatggtctttggctcaacatccctgactacgatgccccgacccaactcgtgaagcctaaggagaggaacaccaggtatgtggatgctgtcatgaccatcccaaagggaacacttttcccaatgtgtggtatga

SEQ ID NO: 909 - DNA, 607 bp, Arabidopsis thaliana
ctaattacattagcctcaaacatcctaagcttacagttttataaaacacacacgatgactgtgtatagtattaacatacatcaatagcaacactcatgatcatcgtgctaggccgggcttggactctagtagtaaggagggaagaaagggatggtggtctggaagggacattcaccaacttgctggatcttgcaaatgttaggcaagtacttagctgactggtaaattttcctggattggaatggtccgtgctgtccctggaggctaactgccctggcagcttgtttcaaggtggggcaaacgcaaactggctcttcctggcgaagctcgttgcagcactgctggagtagctggtatccctgctgggggccctcgaaatcgaactcatcgtcgagggaaggaccaccaccacgtccttgcctcatttgcttgctcatccatctctggcaagctcttaggtgttgtgattgctgaaactccttctggcatctctgtcttggacctacggggttgctggcgtcatcttcttcgaattcgacaacggtgcggtagatggaagcgttggtgaggaggaagcagagggcgagagttgcgcagacgaggaaga

SEQ ID NO: 910 - DNA, 606 bp, Arabidopsis thaliana
aacttagtttcattatcctcttcttctacttctttgtctccttctgctacactcggcttctccttgagcatggctgtgtcaacggtgaactttatcgcatcagctgcagcacgggatcgcaggtagtacatcccggttttcagaccctttttccaagtatagaagtgtagcgaagtgagttttgcgaagttgggtttgtccatgtgtatgtttaagctttggctttgatctatgtagcatccacgatcagcagccatgtccaccactgttctctgtttgatttcccagacagttctgtaaatcgccttcaagtcatcaggtatctcagcaacattgactatagaaccattctcattaattaatttgtttttcagcgttggagtccaaagtcccatatcagttaggtcatggagaagatgcttattaaccactacgaattcaccactcaagactctgcggctgtagatgtttgatgtgtagggctcaaaacattcattgttcccaaggatttgactggttgaagcagttggcattggtgctactaaaagagagttcctcactccattctttgatatcatatctctaagaacagcccagtcccagcgg

SEQ ID NO: 911 - DNA, 606 bp, Arabidopsis thaliana
  misc_feature (1)...(606): n = A,T,C or G
gcggccgcccttaaactgtcttataagatctttcaaacagagaaatttcaaataatatttgagaaaagaaaaacaatcaaaacaatggtcttattcacccagacaagaacagaacactatgcctgggattttacagcagaaaatatcttaaaacagaaacagaaacatgaaacagtaaaaataaaacccgcaagataatgtttcaatgccggtcgttattcaacacgcaaagcttcaggcacacgtaggaaaaaagtatgaaaatgattaaagaggcaacgatccagatgtttagtactgtgtaagtagatcttgctccagcctcttttatgatcagcattcatgtggtggaggtacatcactgtggtcaaccattacgtagtccccgaattttggacaattctccactttcaaatccagattagtgtgagttgacacttcaactcctacaacaactttctccaggttctcacaatgctttaaattcaggactggtaggctggcaggcatctccgggaaaatcgttttgattttcgggcagcaatctannnnnaggttcttcagattctctaacttagcaataaagcttatagtctccaatgagag

SEQ ID NO: 912 - DNA, 606 bp, Arabidopsis thaliana
  misc_feature (1)...(606): n = A,T,C or G
ttctaatggatacaaaactcctctgctcagaaacataaagcaaccatgggaacaacattaatggaacaaaatccataaaatcgagaaatgatgaagtaaaaaaaaaaggcgaagggaaagggaagaagattacataggtattaagctgtctaacgaagctggagaaattattatgcttaaagttcttaggaagaagatcgcgagcgaactccggtggtttccaaacgataaaactgttgttattagcactccaagagacaatcgaatctgtattgtgatcatcaaccatatcataggtcttgctcagaaacggaggaggcgcgtttgaacttagaatcgccgcaggctgaggttgaggagatggcttagtctccattgaatctccnccgccgtcgcttgtgnnnnntttgctcacatccattcggatttttgattccaagtcaatatttgggaattttgagaaaattagggttttatatacgaaactggtgatttttacaataggtgagagagagagataacttttgattgaagatctagagaattctcagagaacattcacgagagatatgggcggagagagatatagatcagaagagagatttt

SEQ ID NO: 913 - DNA, 606 bp, Arabidopsis thaliana
aaaaaaagctgggcattttgatcataattttggagttttatatcaataactaattatacaaactgctatgaagcattttcctctttttagcagacacagttctctagaactaccctcttattactgcatattacaaaaaaattatattacaacacccacacgatttgttcatcgccgatgtcctagagccaccaccggaatcctgaccttatgccctcggctaccttttaactttacctccccgaagctgtatactccagaaaccgatctcacggtcatagtgactgagaaggttctagtagcgcctggtctgagtgtcatcgctggtgggttcacttcgatggcaatagacggctgcatccttgctgttattgtgtatgtttcttctacctctgctacattagtaactttccttgttactgtctgggtccccactagatgagaaactgctatagatggtgcattaaagtttgaaggatgtttcatgtcgtagttacaggccgtgtttgtgtaatttcttatctcgtgggcgctgatccctggggttgtgcataagaatcctagatagtcctcataacctgcatcaaagataagaccaggatctaa

SEQ ID NO: 914 - DNA, 606 bp, Arabidopsis thaliana
  misc_feature (1)...(606): n = A,T,C or G
gaaactcatcactgcaaagaatcccaagaactgttagaaggaaaaaaaattccctgnggactcgatcaatctnnnaatgaaatnntnnaggcgcgggtgatcggatcaatgtgatcacagaagtagaagagaggcgaaaaccgtagcgaatgcagagagaagaagagatagagcgactcgggtttgtccgttgggagacttttcacctgttgattgaggtccaggggtggtggttggggctctggctgagactggaggtaatggtggttcagtgacatcagcatctgtgaaaactgggcttggtgcttcggctggaggtaacgaagcaggactcacgatggttaagaggccagcgggctgaactgggatcatgtaaggaggcacgtctttgcgggtcaagcacgagttccttttgtatctcgcggctgtgagagggaactcagtgatggttccattgataccagctccagtaacatgcgagtttatctcgacagttgcatcagcgaagaaatcccatggttgagaaacaaactcatttcggaacacttcaacgtaaacggggagctgaaacttctgcagcctctccactagtttagttcggacgcg

SEQ ID NO: 915 - DNA, 606 bp, Arabidopsis thaliana
ttttttttttttttttaaagaatgatagaacctcttatctttccccaaactaataattggacaataatattagtagattttccattatccagaattcagctataaatagaaactgaataaaacaaaggaaagaagagcatgggaccaactcttgaaaagaacttccaagtccgttcaacaatataataaaaacaaatcaccaaacctattatctttagactaattaaactctaatgagaaccagcagcaggtcgttgccgtagaggcatggcagcccacggactcatcggacccatcggagacgatgaattcatcacaggaggagccaccgatgacgaagatgacgtaacagcgactcgctcgcaagaaggacacattgtgagagtagtgggaggtttcatgtgcatgtataagtgtggagaaagctttaaagccctaagctcactcacttccttttgcaatctccgattctcatccgttagattctcgcaacatctcttaagatattcacagtctacttccgtttgcttcagcttcgtccttgcccttcggttttggaaccacacttcaacttgtctcgtcctcagattcaattgcttagccaaa

SEQ ID NO: 916 - DNA, 606 bp, Arabidopsis thaliana
ccacgcgtccggaaggtgataaggagcatttgatgtctgaaatgaactttgagaaaacatttgggcaatcatccatctttgtaacctcaactttgatggaagaaggtggtgttcctccgtcatcaagtcctgcagtgctccttaaagaggcaatccatgtcataagctgcggttatgaagacaagactgagtggggaactgagctgggttggatctatggctctatcacagaggatattttgacgggattcaagatgcattgccgtggatggaggtctatttactgcatgcctaagaggcctgcattcaaaggttcagctcctattaatctatcagacaggttaaaccaggttttgcgttgggcacttggatcggttgagatatttttcagccggcacagtcctctctggtatggctacaaaggaggcaaactcaagtggcttgagcgttttgcttatgccaacacaacaatctaccccttcacatctataccacttcttgcctactgtatccttccagccatctgtctccttactgacaaattcatcatgccaccgataagcacatttgctagtctcttcttcatctcactgtttatgtcgatca

SEQ ID NO: 917 - DNA, 605 bp, Arabidopsis thaliana
  misc_feature (1)...(605): n = A,T,C or G
ggagtagcacctccacttctgtactcgaaaccaaccatggcaggtgcataatctataccgaatctcttagnnnnngcaaatattcgaggaaaccttaagtggactgttccaggtgggagacatttctcagaccagacatcaacttgaccgcgctcgttcttgggcacaattccattaacagcgggagggagacacaatggttccatttgccacttcccatatagttccatgcaagaagaaccacctttaatgttgttgtcgccatcttcaaaatcttttactttcttgaacttcgagtttcgcttaagaatctttgagggaacttcattcgccttaagttgtagcccatcacgaagccatctttcttttgttttaagagtctgcacacaggttcgaggatatactggatgaccagagcaaaatcccagaactggaccttttgggtgaagtatctggttcttgtgaagccatttctcaatagcatatatttcatgacttttataagcctgctggttagtaggaagagactcagtcagcgcccgtgtagccaactccatatcttcaagagcactccttataccaaaggacgagctactcgaggaagg

SEQ ID NO: 918 - DNA, 605 bp, Arabidopsis thaliana
  misc_feature (1)...(605): n = A,T,C or G
ccacgcgtccgcattgcttcacttctgcttccagagcttttactcagaagaagctcgctgatctcaaatctctctttgtttccctcgcttccaagtctcagagcaatgaccaatacgtctcgtaccctgttttccaggagaaaggatctttgatatggttactcaacacaggaaagatgataaaatgacttttgaagatcttgttattgctaaggcaacatacgagaaaggaactgatgatgagattgctgagtttatttaccagactttggatgttaatggcaatggggtcttgagaaggtctgatttagagtcgttcctggtggtgattttgaagagtgtgttctccactgagagttctgatgcggaatcaagtgattacaaggagatggtagatgcgctactcgatgccgctactttctcaaaatctgctgatggttctgaaaaaggaatgtcttttgaagacttcagaagctggtgcccactcgttccaactatcagaaagttcctcggaagcnngcttattcccccgggtccagtgagacctggatatcaagtcccgcatctgctatatgaagatagtgtgagttcagataggctactat

SEQ ID NO: 919 - DNA, 605 bp, Arabidopsis thaliana
  misc_feature (1)...(605): n = A,T,C or G
atccatggctgataattgtatcagacttcttcactcagcctctgttttcttctgtttagggcttctaatttcatccttcaacttgttgcagggtattgcagctgaaaatctttccaagcagaaactgacctcatggattcttcagaatgagattgtaaaggaagtcaatgagaatccaaacgctggatggaaagcttctttcaatgatcggtttgcaaacgccactgttgcagagtttaagcgccttcttggtgttaaaccaacaccaaagacggaatttttgggtgtgcctattgtaagccatgatatatctttgaagcttccaaaagaatttgatgctagaaccgcttggtcacagtgcaccagtattggaaggatcttagatcagggtcactgtggttcttgctgggcctttggtgctgttgaatcactgtctgacagattctgcatcaaatataacatgaatgtttctttatctgtcaatgatcttttagcatgttgtggattcctttgcggtnaannttgtaatggtggatacccaatnnnnnnngcgtggcggtactttaagcaccacggtgtagtcactgaagagtgtgatccatact

SEQ ID NO: 920 - DNA, 605 bp, Arabidopsis thaliana
  misc_feature (1)...(605): n = A,T,C or G
gaagcactcacagtcaacaagtgtcggttccatacgggtggaaccgagggtgcgtgaagcccacacgccaactcgcatagtgatttcagaaagagcgacaggccggctccatcggtcatggtatggttgaagcggagtgcgaagataaatccacagcatttcaatcgcgtgacatggacgagaagcagaggagtgttaagcacatcactagagccttccacatcaaagagaagctcttctaggaaagggaatggaggaagaagagcatcagcctcttccagctcagcaagcgccacgtcagcttcagcctcgatgaacaaaacgccttcaccggtgcagtccaccgcgagtttccggtttgaaagttcccggagcctaccagcgaacggatagtagtaaaccagcgcatcggcgagggctttctttatcacctggaccggatcaagatcacttgaaaggttaggtctatagaaaaatataactggaatttgaaaccttagtccttgttggtcgnctatgtcggagagaggcttgagctctcgtggcgttggtttagccggagtgactagctccggctgctggcgatgcaccttgaaagagagacc

SEQ ID NO: 921 - DNA, 605 bp, Arabidopsis thaliana
  misc_feature (1)...(605): n = A,T,C or G
ctaattccgcattccgatgcagtcgggctcaccatacttttgcaggtgaatgaagttgacggtctccaaatcaagaaaaatggcaagtggttttttgtcaaacctctccaaaatgctttcattgtcaatgttggggacgtattagagatcataacgaacgggacataccgaagcatcgagcaccgggcaatggtgaacttggagaaagagaggctctccattgcgacatttcacaacacgggaatggataaagaaattggtccggcgagaagccttgttcaaagacaagaggctgcaaagtttagaagcctgaaaactaaagactacttgaatggcttgttttcccgtgaactcaaaggaaaggcttatcttgatgctatgagaattgaagggaagtgatatcttgtttcccaagaaattctgttttctccaactggtcactgtcgtgttcatattctgtttttccttctctcttatgtctttggttcaaatctgttaaagaaaaaaacgcctgtgaataatacttaataagcnnnttcgtcttcgtcaacatacaaaaatatcaactacgtagtaataccacaccttatttatttagacacata

SEQ ID NO: 922 - DNA, 605 bp, Arabidopsis thaliana
  misc_feature (1)...(605): n = A,T,C or G
ttttttttttttaacacaaagcgggttttatataattcatttatacacaagcataatccttaaacaaagcaaanaacacatgacagtgacacactgatcataccagaaannacacacaaactaatcacaagtggttggtattgtctcaaccattattcaagaggccatatttttgacactttttcttggtacaagagttgtgaatcagtagaaagggaacatcctcagcttagtcttcaaatcagcttttggagttgctgccttctggaacttaactaggagagcctcatcgctggtcaaggctaagcgtcgtgcaccagagatatcggtgaatatgccaacgttcatgcacgtagtagtcgagatgtttgtacaatatacaatcttgtaagcacctccgtcgactcgatggatctggaagccacttgggtttgatgaaccaccagtgcttattataagactctttttgaattcttcagagtacacaactctccaccccttggattctttaggacacaaaaaccagttcggagcctcaaactcgatggtgatactattcatttccttaacaaaccataactcggacttaaatttgatgggtaggc

SEQ ID NO: 923 - DNA, 605 bp, Arabidopsis thaliana
  misc_feature (1)...(605): n = A,T,C or G
atcttgaaatggctggtcttaaggaaaagatcgctgctctctttaacctctctgcggatgctgaattgagtctgacttactctgatgaggatggggatgtggttgcccttgttgatgacaacgatctctttgatgttactaatcagcgtcttaagttcttaaagatcaatgtgaacgctggcgtgtccactaactctgctgctccagagagtagtgggagttccacacctgcgggtatgcctaacccggtttccaaaatccagaagggtataaatgatgttctgatggctgtacctaacccgatgcgtgataccatatcaaaggtgtacatggaccttgcatccaaggcctcaacttctagtcctgtagttggtgagatgcttgattgcatttccaagctagggcagctctcaattcctcaggaaagtagtccttgctcacctgttaccaagcntggttcttcaggtgcttccctgagcagggatgttccttccgctggtggaaagaaggatatctctgagaggacccagaccggaaggaaacctgttaatctgaatgaacccactggcgctcattcaaagacttctggtcatgtacctcggccg

SEQ ID NO: 924 - DNA, 605 bp, Arabidopsis thaliana
ttttttttttttttttttttaaacccaacggcttccaaatttcatttcactgaatcatgttcgaagcaagtagttacatacataaatggagaacaaccgaaacagtaagcaaaaaccagaatcacaatcatcatcaaagcatatatgaaatgaaaccagttcacgggatatttcagctgaccagaatcactagactcaatggttttaacaaactagatagtgttgggaagctcgattagtaacggtatttggtggagtaatcttttggagcaatcaccaacccacgacccttccttgcaccacggtagacagtctcaatgatatcaatgaactcctgcttgtccttgagagcccagttgatcttgttgttgttaccagttccaagatcgatcatgatgtgcttgttcctgaagaagaacatgaccgtagaaggatcgtacagctcgtacatggtgttgaagtctggaacctcagtgatgtccaccagataaatgactgcaaagttcttaatcgtctcagcaacagacgcaagcacctcatccatctgcatacaggtctcatcccagtcatggccgaaacgaatgacgacgagacgctcttcctcg

SEQ ID NO: 925 - DNA, 605 bp, Arabidopsis thaliana
tttttttttttttttttttagagaagctaattgtaatattaccgaacagtaaaaatattacaagacactgaagacgcatcgccaccgttaaaagctaaaaactaacccagatggtggaaatcaacggtcactaacaaacacaaacgacatgaagcaaataaaagattgcacatatagccaaaatagacgaaacagaacataaacacgtggcgtaaagaacataattattttacatcattctcatgtcactctaccctctcggctcaacggtgcttgctcctagtgtcgtcgctgtatagccaatcgtagacggtgggagagtttgggtgagaaggcttgtcgaagaggtttgtgcccattcctctagtggcgatgttacttcctggatgaaacacacttctccacacgttttccttacgcgccgatcctggcgtcgtcggagttccaggactcccggccaccgccgccacagttttactactgctcccttctcctacacctttgatgtcaaggggttgggtggtgatcttattgcggaggcggccaaggccatgctccggtttaggtccggctacagtttcatcccacatatttctttctttttt

SEQ ID NO: 926 - DNA, 605 bp, Arabidopsis thaliana
ttttttttttttttttttttttttttggccaaagataaatacataacaagaaggattgatattacatagacaaaagcaagcctaccaattggaagagttgcatattattcatttatagacatgttcattttactatgactaaagtctaaagtaaccgaaaaccagttttggttcggtttgacttcgggcaaaccaccaaaatccctgaccaagtcatacatcacactaaggccctctagatcatacataatacacattttacagtacgttttatccacacatagttaccttttctctcaaggcagtaacttctccagcaaattcccaaagaagaaactggttttggcccatcctcctcctgttccggcttgaccttcttctttccattttctgctcggaactttattcttgaagtcaatcatcatactgtgtccaatctctccgcgtaacgcctcaatcgtcttcacatccactggattccctgaagcatctttcacatagaaaacgttgacggcttgttctcctactgttgtcacaccagctctcgacactgatagcccgtgctctctcagaatccttgtcacttccgacagtaatccaactct

SEQ ID NO: 927 - DNA, 604 bp, Arabidopsis thaliana
gaaaaaccacaatagcacagatgctctggttggtcttgtgactacacttgctcgtgtcaatgttgagaaagcagaaagttatgagaaacagcttaagcccctaccaggtttgaaggctgttgatgtggataaactagaaaatacctatggtgcaaaacccattgaaggcgctgctgcttcatcgagtcaggaagaagtgaagaaagaaaaggcgaagaggaagaggaagagaaagccaaagtatcccaaaggatttgatccggcaaacccaggtccacccccagaccctgaaaggtggcttcccagaagggaaaggtcaagttacaaacccaagaggaaggacaagcgagcagctcaaatccgtggctcgcagggtgcggtgaccaaggataaacaagaagcagctccttcaacttcaaagtcaaaccaagtggccagttctaaagggaatgcacctgcgccttcctctaaggcctcaaaaaagaagtctagaagatgaacgaaacaaccctttaagattgtttcatctgttctgagaaaacaaaaacaaagagtacttagccccaaaatttccattgttctttttctttttggattcatcaag

SEQ ID NO: 928 - DNA, 604 bp, Arabidopsis thaliana
ctttttttttttttttttttttttttttacaaagataatcggtgacgttgttctttcatatttattgatgttgtacgaagaaaataatttactctttcaaaaaaggagaaaataaatgttattttcttctcttcactcacatgatgaatcaaacacagataaaatcaaacccattatttaacaacaatcaaaagactaacaagaaggatgagaatactcatcaggtgctggaaggaacaccgagatcgtctgaagagtaaggatgaataaaagcattgttcatttgccagactgtaaacgacgccgtaacggtcgcatcaatggcgttattgaacaagaagagctttgtagctccatagatagcttttgtgggatatactcttgaggtaatacatgatcttccaccttgtgcgaatccttctactatcgaatgatcaaccaagattctcattgtcaatttctctccttttaagaccggtacgaagcttccatagatcggtttcaccacatcgtttgccaaagtcgaccttgaggtgtcagtgcagaagacagtattgagttttgaatgttttcccttagtcacatagaagtaaaccggagtttg

SEQ ID NO: 929 - DNA, 604 bp, Arabidopsis thaliana
  misc_feature (1)...(604): n = A,T,C or G
acaaagaaagcagctttacagttccagggacaaagattgtttccgtagacagccctgtcgggcgcttaggccttactgtatgctacgatttgaggttccctaagatatatcagcaactgagatttgaacagaaagctcaggttttactagtaccatcagctttcaccaaggtcactggggaggcacactgggagattcttcttcgagcccgagcaattgaaactcaatgttatgtcatagctgctgctcaagcaggaaagcataatgagaaaagagaaagttatggtgacacactgatcattgatccgtggggaactgtagttggaaggttacctgatcgtgtttcgaccggcattgtcgtggcagatattgatttttcattgattgactcagtgagaacaaaaatgccaatagataagcaacgagtctcaatagatctctgatgaaaccattggtgttgtgaaatgttgccaatatagttacaagcgtagaaacatatcaccttatttgaattctacattctctgtttgcttcggtgtattgtnncatcattggttaggtgtagatgatcattgagctttagacagtagcttgtcacctatac

SEQ ID NO: 930 - DNA, 604 bp, Arabidopsis thaliana
ttttttttttttttttattaaaccgtacaatacaattgcacaaaagccttccagagatattacaactccaacaacaaacccaaagacacataaatgatcaatcaatagacaaagattcatctaaaaatgatccaacggccagaaacccattacgatgcaaattaaaaaagcaaatcacgaaaaattcatcagattaacaacgttgaatttgacgtcttcagtaatcggtggtaggcaattgctcgtgggcattttcatcgatgaagacaaagtcgtagataattccggcgagtccaccaccaataagaggaccagcccagtaaacccagtggttggtccacgtccagcttacgacggctggtccgaaagcaacggctgggttcatggaagctccgctgaaagctccaccagcgaggatgttagctccaacgatgaaacctatggcgattggtgcgattgttccgagactaccgttcttggggtcaacggctgtggcgtagacggtgtagacgagcccgaaggtcatcacgatctcgaagacgagagcgtttaatgatccgactccggcagagagaccgaacgacctgcccgggcggccgctcga

SEQ ID NO: 931 - DNA, 604 bp, Arabidopsis thaliana
ttttttttttgaagtggaaaatatgttgcattgatagtagttgagaataggagcgtaacttgactctacaagatgaggtagaaactgagggtggtgacaggtgattttaccaaagcggtgtgtgtaatggttaacactgttcttaagaagtgcatactctatagatgaaagaactacagatagcccgtgaaagcaaagctgatccagaggaactttaaagcctgaaggagcctgcctttctccttgaaccgttgatcttagcagaggtacgaggatcagagaactcgtaatacatgtctgtgaagaaattgtcaacaatgtcaagatacacaggacttctgatgcttgaatagcatcgaagcgcttcccttacatccaatgcgtgatccacgtctctcagatccaccatattgagatctttcatcttttgcgccaacgcgtcacctcttttctttgcatcctcgaatggctcagcgactttcttcggtttctttttatgttggttgttgagactcttctggtgtgttgtatctgccacagccgtgtcacaacagataacggtgtagctttctttggtttgggtttgggaatcttctggacagcg

SEQ ID NO: 932 - DNA, 604 bp, Arabidopsis thaliana
gtacttaggacccttttcccttttcggtatcccttcagttttttccacttccttaaaaacaagtggcttcacaaacatactctcaaagctcttatcatttacatgagaatccaacgaagaggtcgaatagttcctaaaatctgaagctacatggggaattactaaaacaccccttcctcttcctctactactacctctagctcttaaaactctagatcctcctcctccccagctaatggaatcggaatcacaaaaagcattccgatccagaacaatccgacggcaatgaataccagatctaatactcctggaatcaatctttgtacagtgtaacttcgacgaattgatgaatttgccagagttcgggggagaaaaaccgaaaagcgaggaacttctaaaactaataagaaatctacaacagggtttcatcgcagagacacagatacagcttctactgttcattctctcgaataataataaaaactatacaatcaccaacaatacaacttagccagcttcttgatcgacgaataaatccgatcgtagaaattgggggatgtctgataggaacaaataattagatcggagtacctcggccgcgacc

SEQ ID NO: 933 - DNA, 604 bp, Arabidopsis thaliana
cttttttttttttttttttttttttttttaatttgtcaattctctgcttcttatatataggtattattgcacatagttgttacaagacttccgttgataaatcaaaagagaaaaaacgaagacactgtaagatgctgatcaaatgcagataagagagaatgatctgatgatcacttagttttggtggggaaagaagccatcttgttgattccacagagaccctctggtttcccagtgttcctcttcagcctgatgtaacctttttctccccattttggtccccaagaattcttcacaatgatgtaatctgaacccttgcttgatccatacccaaccgcagccacaccgtggtcaagatcaaccccgcaccgcccatcaaacacgccgccgctatagaactggaactctctaccagatgcatcaatggcgacactgagaggctgatgagccaatgccttcaagagactcttctcatcattagtaggtacgtcttggtgtccattaatggttactgtttcagattcatccttttgcatctcgcaagttccttcttccatagagtaaggataatcttcttccttgcgtagacctccgttcttaacaa

SEQ ID NO: 934 - DNA, 604 bp, Arabidopsis thaliana
cttttttttttttttttttttttttttctaacaataatgaatttattgcttgatgtgttttcaaacaccaaattatgttttatggtttgttacatagatccttatttcaagaacctatgaaactacaaaagctgagacaagaacaaaccaaaactagagagggaaggttttgaaggcaatgtcaagatcagatatcaaatcatcaacatcttcaattcctgcagatatacggacaagatcttccgtcaaacctctggcctcacgaacttctgcaggtatgcttgcatgtgacatgaagcatggcatgcttatcagtgacttaacactcccaaaactgacagctatgctgaagtatttggtggtttctacgagatgatttgaaagcgcaactgatccagttataaagctaaaaactgatcctgcacccttcgcctgagagaagtggagatggtgaccaggatgatctggtagaccagcatagtacactttctttactcttggatgagaagacaagtacattgcaattttccgtgcgttttcctgttgcttttctatccgtaaagccattgtcttgattcctcgaaggcaaagccaacagtcgaaa

SEQ ID NO: 935 - DNA, 603 bp, Arabidopsis thaliana
  misc_feature (1)...(603): n = A,T,C or G
ttttttttttttttaggggcaaggttcattgcatatagtaacagtcttgtaccaaatttctgatattatatacattaaaacaacaaatgtttttgactaaatagagagtcctggannnngggaaaatctatactgagtttaattagtttcagcagcctccaccatcaggttcaacagaactgagaaggccgttaccgcgcagctgcatacagtgttgctctgcatcagcctgagcacaaacaatcacaactgccaaaccgttgatatgagcttcttgcataatgttaaccgcgttgtctacagtcatgccgggtattaccttcatcaacacctgaaccacatattccctcttgttgaagttgtcattgtgtagtatcaccctgtaaggtggagctatcttctttgatttccttaaatcaaactcggattcacgaccaggagtggttttctctataattggtttgtctaagacaccacctcctttacccaatgcagcagatgtagacaaggtcatgagaatgctacgattcacacatggtccttttgagactaaatgtttgtcccctgatttagaattgaagagagaggatggtgcgagagcta

SEQ ID NO: 936 - DNA, 603 bp, Arabidopsis thaliana
  misc_feature (1)...(603): n = A,T,C or G
tttttttttagatttcatgaccatattaaatatatttgtcaaacaacttaaaaatctggacagaacctgattataaaacccaaactctatggaaacctaataggacaatgcagagtaagaagaataagaatactgaaacgtcttgtagaagagataattctaaagggaagactctaatgttacaaatcgacacctatgactacaacagcttcatgtaagtcagaaagcatcgacgaagaagcttaaaccaaccatgatcaatcttacgtgaataacttctccgatgtgtttgtataataaccttcatctctcacttctttttctaccttgaatatctcaatatcatcgaaacctgaacccaaatcttcagtatcatcaatgattggtgctacttggttcctatgaatagactcaagcgacttccagtccgcgcttccatttccttctacacaagcttggtctccagaaacccattctttcagaacatctatcctgttgtgtgacaacgggtctagtgtgtcatctccgcttccaggacccagttgtctgnngcgcatgttgtactgaacaaatacaagatcgctgagtcgtttttgctcaatg

SEQ ID NO: 937 - DNA, 603 bp, Arabidopsis thaliana
  misc_feature (1)...(603): n = A,T,C or G
gttttaaaatctttgattatcgacgacgaaaacaaaacccaaaaacaatggaggcgcatgtttaacactaaaatcgaaagcgcatgttagcggcaacagcgcatcttaaagacaaacattctcgtctctccttctacaactactttttattttttctatcttcttttcacacattcgtcatcatcaccatccgaattttccgggtcgggtaatttattcaaatcgacccgttccaatgacccgttaccgctcttacgacaattctcaatcttctcgtaatcaccgcgattctcgccgccggtattcacaaccaccgtcgctccaagcgcatcaacctgagcaccaacctccgccgcttttctcctaatatacgccgccgataaatcaccacctcttcctccgccgttagaaacagtaagtccagccaaaagctccggaaaattaagcctcgctgaaggannncggaggtaaaaaacagnagtgtcgtaagctctcgccgccgcttcaggcgtcgcataagaacctaaccagatccttgatctcttattcggttcccgtatctccgccacccatttcccccatttcctcattcgtattccttta

SEQ ID NO: 938 - DNA, 603 bp, Arabidopsis thaliana
  misc_feature (1)...(603): n = A,T,C or G
aagaccactcgtgctggtgaagagatgggaatagaaccgggtgctttgacacatagagatcggtatctgctccatctttctccacatcgacctttacaatgacttttacgcttcctgccattactttttctacagtagcctcgtcaattacaaacttatagtaatcataccgtccttcctcaactgttccagattcagatttcccatattgtaacagctttaacacatgctgattcggttgatctgaaactatatctggactaacaatatcaacctcaatgtcagtctccagaactgaaatgctagtggcaggtcttaactcaagaacctgaagcttgtaagagacctgcccataattaaccaagagaacatcgtctaaagaaagtgtagcatgttgacgaagaatagtttcaagtattgctttatggttaggcaaatccgagaaaccaaggttatccggttgaagctttgcgtaacttcctttaggcaatcggatataccgaatttnnaccaaannncatccattggatcatgcgttgaaaacaagttgctccacacatgtggaggaagcccaacagtacctgcccgggcggccgctcgagg

SEQ ID NO: 939 - DNA, 603 bp, Arabidopsis thaliana
gatgaagatgatgatgttgaagaggaggatgaagaatctggtgaagggtaccttgttcagccagtctctcaagtggaagatcatgatgctgtgggtaatgacatcgagccgatcaatgaggacaatgatccagatgaagaagaagaagtcgaagatgacctgccaattcctgaccagtccttggcttcatcatctcgcccaaagagaaaacgagatgacgatgatgacggtgaggatgatgacgatggtgatgaggaacgttgaacatacagatcagaatctctagtttgatgagttttagatggaaaagaagctcggctccttcttgattcaggcggctatatctgaatgttcaaatgtcagttatggtcaggctggtagattttcaaatgacggttactcagcttggatttaccgcccttttagaaaccccactttatggagggaaagaaaaacacaaaaaaaacacaaaggaagagtttcgagaccttgtttctctgttagagggtcttgtaagaatgcttatgtggataaatcttttgagttatatcgtcttttgttttacatccaaaaaaaaaaaaaaaaaaaaaaaaaaaaaaaaaa

SEQ ID NO: 940 - DNA, 603 bp, Arabidopsis thaliana
  misc_feature (1)...(603): n = A,T,C or G
tttttttttttttttaaatagcaataatttcgtatgaaatatcttttacatcaaatatctctataagcctcgtctttaaaaccagacacagaaactcctcactttcgaaaaaaacaagatcattacacaaaaatgggacacctaattcctcaaaccggagatgaagagaccgagcttggtttagctgcggttaggctagctaactgtgcagccttcccaatggttttcaaagctgccatcgagctcggtgtcatcgacactctctacttagctgctcgtgatgacgtcaccggatccagttccttcctcacaccttctgagatagctattaggctccccacaaaacctagtaaccctgaagcaccagctctgttggatcgtattcttcgtttacttgctagctactccatggtcaagtgccaaattatcgatggtaacagagtctacaaagcagagccgatttgtcgatatttcttgaaagataatgttgatgaagaattaggnncacttgcttctcaacttattgtcactctcgataccgtcnnnntcaatacatggggagaattaaaaaatgtggtactagaaggaggagttgcatttggc

SEQ ID NO: 941 - DNA, 603 bp, Arabidopsis thaliana
gcggccgcgataagcgatattgaaggagcaagaaaagcaggtgaacttttcggttaccctcttatgatcaagagcaaacgattggcttatgatggacgtggaaatgcagttgccaacaaccaagatgagctttcttctgctgtaacggctcttggaggtttcagtcgtggtttgtatattgagaaatgggcaccttttgttaaggagttagctgttattgtggctagggggagagatggttctatggtttgttatcccgttgttgaaaccattcacagggataacatatgccatatagttaaagcacctgcagatgtgccttggaagattaacaaacttgccaccgatgttgcccaaaaggctgtcggttctttagaaggtgctggtgtttttgcagttgaactgttcttgacagaggatagtcagattctgctaaacgaattgcacctagaccacacaacagtggccatcaaacgatcgagtgctgttatacttcacagtttgaacaacacttgcgagctgtggttggtcttccacttggtgatccgtcaatgagaactccggcgtccattatgtacaatattctgggagaagatgatggag

SEQ ID NO: 942 - DNA, 603 bp, Arabidopsis thaliana
ctttttttttttttttttttttttttccctttttttttgtttgtatcagattattattacacaagttgttactctaaatatggaaatatatttaaatacataaaaaagctaaaatctagcgttttcgaaaccatgcaagtcactgactctgttcatatgtttcctcaccatcgccactttagccaacctctccgccgctttccaagccgacgtcggagtaagcgactccaaactctctgatgccgccacgtgtcttcctttcacactattaagatcagctatctctgcgtccagtccacgtatacacgcatcgctcgagctcaaaccgtgctgcacaagcaatgctctagctgacgtcagcaatctatgagctccggagtaatggttacgctctattagccgccgagactccgcgacggctcgagtgctgacgtggaggtttctgagccgtgagatgttgggatttgatgatgatcggacagttagaggagtaggtattaaaagcgcgcgatcttcggggtttcttaattcctgagttgttggatccacgtaacgagatctaacggtcatgattttgtgagatctactaccggttaaggaatt

SEQ ID NO: 943 - DNA, 603 bp, Arabidopsis thaliana
cgtaaaaataaattataaaccaaaaacaatgaatctcgccacaaagtttcatgtgatggtacttttgctcattgtaattggagatgtttgtgccaatgtaggcgcaaggccgctagaagaagtttccaaagaacttatggataagaagaccgcttcggttcctaagacactgttaccgttcgcaccaatatcattaccaacattaccgccagcgcagttaccaggtttacccactccgccaaagatgtctaatggtgacactggaggagttgatgagaacgcagatggtagactacccaaagatgcttcagcgggttcccatggtgccacagccagaggatatcgttccggaggtggcaggagtgatgtgtctggcagcactgacccttggccttgagcgtgaggtgatgatgttcaattgttcattgctcaaattgtcaagagggaccaatacaaacctatatattaatatattactctacaaacgcacagtctcttttatgttcataaataaaactagagattgtcccctttaataataatcgtgaaatgctactttttatgtgtaatgtctcttgctatataaaataatcatttacgacg

SEQ ID NO: 944 - DNA, 603 bp, Arabidopsis thaliana
tcgagcggccgcccgggcaggtgagagaagaagaatcgtggagatggcttcgaccccgaagcttaccagtacaatttcatcatcttctccatctcttcaattcctctgcaaaaaactcccaatcgcaattcatctaccatcatcttcttcctctagctttctctcgcttcctaaaaccctaacctctctctattctctccgtccccgtatcgccctactctcaaaccaccgctattaccactctcgccggttttctgtttgtgccagtaccgataatggagctgaatcagaccgccactacgattttgatctcttcactatcggtgccggaagcggcggcgtccgcgcctctcgcttcgccactagcttcggtgcatccgccgccgtttgcgagcttcctttttccactatctcttccgatactgctggaggcgttggaggaacgtgtgtattgagaggatgtgtaccaaagaagttacttgtgtatgcatccaaatacagtcatgagtttgaagacagtcatggatttggttggaagtatgagactgagccttctcatgattggactactttgattgctaacaagaatgctgagttacagcg

SEQ ID NO: 945 - DNA, 603 bp, Arabidopsis thaliana
ccacgcgtccgcttcatcaaatctcacaaatcttcaacacttaatcacaaatctcaaagcttcggataccaaatggctcgtaccaagcaaaccgcaaggaaatccaccggaggaaaagccccaaggaaacaactcgcaacaaaggcggcgaggaaatcagctccggcgaccggaggagtgaagaagccacacagattccgtcctggaactgttgccctaagagaaatcaggaagtatcagaagagcactgagcttctgattcgcaagcttccgttccagcgtttggttcgtgagatcgctcaggatttcaaaacagatctgcgtttccagagcagcgccgtcgcagcacttcaggaagcggctgaagcatacctcgttggattgtttgaagacaccaatctttgcgcgattcatgctaagagagtcactatcatgcctaaggatattcaattggcgaggagaattagaggcgagagggcttaagaaggagattgaagtactctagactgtgatcgttatgcttatgtatatttttcgttttccctaatttcgtgttttagggttggattaggttttgcgtttatgttgttcgatgaaatgcct

SEQ ID NO: 946 - DNA, 603 bp, Arabidopsis thaliana
gtatatgctcaaggattcacactttaatatctgctagtgcacaacttcagaagttgtacagctttaagtatcagatgatcaaagggcatggagatattccaaaaaaacattaattggataacatcaggactcaccctttgctataagaataagactatgtataacaatcaaacaagcctataaataacactagaaactagctttcatttttttttagtagaagcttttcttcaatttcctccaaacccagcttgcaaaaatgggttttactgcctgcctttctttgccattttctgattcttgcacatcctaatactagaaggtgtaacctccaccaactcatcctcttcaatgtattcgatgcagtcgtccagactatatgttaagggagtgtcaagaatcactgttacatctttgttggatcttatgtttgtcgctgccttcttcttgcagatattaagacccaagtcgccgggtctctggtggatcccaactatctgacctttgtatacatccactccagaacctacaaacatttgccctctctcctgcgcactcgccagggcatatgatgttgatgttccatcttcaaaggcaaccagc

SEQ ID NO: 947 - DNA, 603 bp, Arabidopsis thaliana
tttttttttttttttactttaaaaccaagagagttttatacctttatttcattgatagcaaaacatgaaaaaaaaagtaaaacgaaaactcggagagcagaaacaacgattacatcacaagcatcaacaacgttgtcgtataacaaattaaactcatcaaagtccactttattcgtaaggttgttgttgaaaaagaagtagtgatatttaaacggagactatgtttgtcacagagaccttaaccatttcagcttcaaagataatggcatcattcaccatatacccttttgatgcatcttttagctctgacatcaatattatattgttcactcccacaccataatcgcttcgaatcgggtaccaagctgcagaatataattgtttgtggttggagcttcgttgattctttaaccgcagattaaccgctccccaagtgtttgtaacaactgcgtttgccttatggccttgagcatataggaagattggaagtgcatgtggtcttcctccaccagatcctttcgggttaaatcctagtctccagtatcggtctccaacaagaaaatcatcagagtaatagaatttatcttccaaggtagagaaacg

SEQ ID NO: 948 - DNA, 603 bp, Arabidopsis thaliana
tttttttttttttttaagatgactaataaggtactattatcatagttttagcacatcaatacaacatatgatatgaaaataagacaaagcattgagacaaaaacaaatacatggtaatatcagctaagatatatagccgtattttattctagtacttctggtaaaccatactcttaacgccaaaacgacgacgtaagcttccatttcacttgatgttgttgcagttagtgctcatggagattggatatggaatgctaacaccgcactttccaggaaggccagaggctagacttgggttgagaccagaaatgctcttcgcagtggactggatgcatctgcaagcttgttggcggtctggtgtggttttagccatactgttcaaagttttgactcctgcacaacatgaaggtggcaccaacccaccttttgatagataggttgcacatggagccaagctacctgccactgtgccacatgagattgcagcatcgactgatgcaactatgcacaccgttaaaacaaggcatgtgaagaacctcaaagcgaaagccattgtgtttgaacttctttttgggtgataacaaaattagttgagtttcgttt

SEQ ID NO: 949 - DNA, 602 bp, Arabidopsis thaliana
ttttttttttttttttttttttttaaccaccaattcatcaccatgcaatttacatttttttcactcgttcttatcttaaatacattcgtgatggaaacataaacaaacatcaacatccaaacacaaaaaataatcccagtaaaaaaaaattaaaccaaaaaaaaaaaacatcacataacaacacaagcggaggcgttctcgtcgctaaacgccgtagtataacgaacctcagtggagctagcacgtgcgagacgtgacacatgtggatcatactcggtgttcctaacgtacccagtcggggctctgttatcgtaaacaccagacgcgtaaggatgagccacaacgtcgtaaggaacgaaaggatatagctctgctcttttaccggttcggtgaatgatacgagccaccactttgtttggttcaacgtacccaaccactgtcactttctgagcatttggctcgatggttacatctcttattcctctcattccttctaaagctctccttactttcctctcgcatccttcacaatctatcaaaaccctcacatccaccgtctgtagacttttgtgtctcttggagcttccatgagaacaatcgaa

SEQ ID NO: 950 - DNA, 602 bp, Arabidopsis thaliana
ttttttttttaacaaaaccatatttgataatatgtagaaaaaaaactaaaataaaaacatgtatataggtttggatcaagtcaagggacccagaagacagtccggtttgcttgccggttcgatttagaagacaatagtttaaccaacacaagctattaatattacaagacacaaaacccaaaagaagacttttaactcaagaaagcttaaaaagaaataaaataaaacaaagcctattggcgttgattgatgattgatttgactcagtgaagcctagtgagttcttcaactctcttacacaactcctccacttgaacattcatggatttcgatatatcctccatcttgtttctactcagatccagaaacgattcgattaagtcaccatccaagaaattcctcgcttccgcggttcttttctcgttattaaacgacctccattgctcgtggcttaatccgccgactcctttaatcacttttctcaaacttgactgcaacttctccaagaaagtatattgttcttgaggaagtgaagctattactccaatcactccattgactgtaccaaagatgacagttgggatctgaccaatctctgaatc

SEQ ID NO: 951 - DNA, 602 bp, Arabidopsis thaliana
tttttttttttttttttttaacaagacaagtctctagagttgtatataaaaatgtacatccatgtcctatgattatgattcctatcatctataactataagaagacatcataataagtctgtgttaatgtcaatagtataaagaaggtaaactccaaaaattgaaaagagctgaagcaagtaacagaaaccaacacaagaaagccaatgcagccgagacttggtattggatacagaggctaccatcacagatctttccatcagcagacgcaagcagttcagttgcactagctacagcacaagcaccaccaagagaaagaaacgaaagtacgaaatcaccggcgaaaacgatggaaagaactcttaattcttgaggaaggagtttcactaagacagagtatgtgtctgtcaaggcaagtaaaatgctccatggagttacaattgccatcaccatcgctaaatagcagaaagtagtgaaatcatagaaatcgaaatcaaagcacatgaagatcaacgaagcagctgagaaaatggtttggccgaaacggagagcgaagctggcgctagtgccgaacgatcccggcacatgctccatccaatttc

SEQ ID NO: 952 - DNA, 602 bp, Arabidopsis thaliana
gcggccgctaagaacacaacaccattcagataactcttttaaatcccaaatttggtttatgatgatggatcatctgagttttatttatttattaaaagttaaaaccagagtcttgctgaaactgaaactttcctcagttcatcaatgcttctgctaatggaaatgtcggagatatatccaccggtaccttaacgcgttcgagattctccagagcggttttcaatggtccggtgatagtgcagtacttatttagaagcaatgttgctgcgtttttgtcaccttttccttgaatagttagtatctcatggctcaggctctcaactgcaccttcgatcttagcgaaatcaaccgagaatgtagagtcctcgtggaacacgaaggctcctttttcatataaatagttgaattgcaaggcttgccctttcccatgagcttctgtgagaccaaaccggatcgatctaaagcaaccagctaggaacgaaacatacatactctccaccatactctttgaaagcaaccccttagtgatgagaaacttcagtgcccaaagaccaactatatctgcctttgcttcttccattgcagaatggacttcttgtagt

SEQ ID NO: 953 - DNA, 602 bp, Arabidopsis thaliana
ccacgcgtccggaagtacccatttctcaaaaagacgagccacatgcttggagccattcctactccatcttcatttgcttcacagttccaaacaaaggacgcaatgcgtctacacgcagcacaatcttctggttcagttcacgtgactgcaggtatgatgagaatatcaaacatgactctagcagcggacagcggtatgggctggtcatatgacaagaacggtaacctcaacgtagtcctttcattcggggtagtccaacaggatgatgcgatgactgcctcgggaagcaagacaggaattacggcgacaagagctatgttagtcttcatgtgtttatgggttctcctactctctgttagcttcaaaatagtaaccatggtgtctgctcggtaataggatcaaagttgaatcgtctcaaagactttttttggtgtttgtacctctccaatcatatagcctttaactttggcagtgctttgctgctcaatatttaaatttttattcgaagggtttggtgtagcttgaattctctatatggtttctagtttgagtttctagaaataagaacataaacaactttcttaaaaaaaaaaaaaaaaaag

SEQ ID NO: 954 - DNA, 602 bp, Arabidopsis thaliana
ctttttttttttttttttttttttttttttttttttttttttttttccaagctttgacctaataaactcaattaccattaagaaagaatctaatgtaacataaatacacagacatattatcaagatgcacatacagctttgcgagaatgtcctgagagctaatagcttcgtcctttttggcagatcaaaaaaattccctcagcagcttcccagtatagagaggcttatgctttttaacactacaagtcatattttggtgctttcaatcttgccttggaggagatgcagctgttgtttctctcgctgtaccattgggctggctttctccggtaggtgtttgtacagttgtgggttgtggcggttcttgagtctgagtttgatcctctgtttggctttcagcgggagacaaagcttttagctgctcttcagtgaacttgaggtaatcctcggatgtgtaagcttttggtgattgtgaatcattgggatcatttgcagtcacaggagcttcagtgctaggaactgatggtggtggtggtggaggaggaggttgaacaggattcgttctgttttggttgtacacgtttggcgttgagatatcatca

SEQ ID NO: 955 - DNA, 602 bp, Arabidopsis thaliana
gtttaatgttttagatattttccattaccagattctttacattttcggtgatcttgtatacacagacatttttttcgttaccagattctttacttcactctaatgaaggaaaaacattttttcacacactcttccttgattatgatattggatccaaagtctgaaagttctaatcgtggtttgctaaagcataaaccacggcggttctacacggtgcatagaccatgaaggagcagggtcgttcgtcgtataagccatcataagtgaagtactctgccttgcgatcgagcctattgaatccaccaaagagaggatcgtccgagtccaatacgatcttatattttccaggcttggagcaaccaatgcggtaatcaaagtagctgctggtccagtgaaagttaaagacaaagacgagatcacctctttcgaatacgattactctatctgcttcgtcttttcgtgatatgaattggtgctccgaagtcataaaaccgtaattctcttcaagatgttgcattgcctgatcaaattcttgtagtccgcggtatctgagataatctgcatccccaagatcaaatctgcggcggcatttgtcataactg

SEQ ID NO: 956 - DNA, 602 bp, Arabidopsis thaliana
tttttttttttttttttttttttttttttttttttaagtggaatcaattccattataagaaatatgaatatgtaacctctctttggagctaaatattgtattcgtcgtgacaaaagcatttacaaaccaatagtaacaaagatatcgagtgatccattatattccatctttcttttttactctacacattctataatcaacaattaccatcaaaatagaaagtaaaagtgttgagatcaaacaagtattgggggtggaagaaccttaagtttttcgttgtgtttggctgagctgattgagtttgacgatcagctcagcgtagaggatttcattccaagagtctggaaccccggggaggcaccaatggctgcagtcttggtacagcaatggcgactttttctctttttccgataagctctgtttccggtatactgacgggtgaccgtccttcctgtagtccgttaatctcgtgatgtttagataagtgacaggtgttttcatacctcttaacactttctcaagcactttcattttagacgggtacggggttaggtatgtatcgttcttgatcggttctgtttcgctatcgcatgctcctcctg

SEQ ID NO: 957 - DNA, 602 bp, Arabidopsis thaliana
tttttttttttttttttttttttttgtggatatttttttttatataataaaattcaaatgagttgaatgaaacactgagaaagagcaaaacagtaacacacgcacacttgagagaatgaaacaatgacagatcgatttataacaaatttgaatccgtaaagaaatgaaaaatcagaagattgaacaagcaaatgttttcgagatcactggctgcgcggcgtacggctgctctctgcatttctaatcggatagaaatatggatgcgccattgcttctttagctgttggcctttcttggtgatcatatctcagcaacttgtccacaaaatcaacagcctcaggaactgctaagtgctggttttcagaattgatgaactttgtccatggcttccggctatgtctgcccacgagggatgttagattagggtccaactctatacggtatttgtttaggtaggcgttgagttcatctgtgccaagcaccttcgcaattttgaccaattgatcatagttgtcatggccataaaagaacggctccttgcggaatatcattccagcaaacatacacccaagactccataggtctaaggaataatcatagtc

SEQ ID NO: 958 - DNA, 602 bp, Arabidopsis thaliana
tttttttttttttttttttaataaggtaccgatactatatattatcatatcttaaacatgttaagacacaagtatacaacataacaaagcaaaagattacaaagccatcaagacaaacaaagacaaggtaaatatcagcttagatagccgtcttattttacgtatacgaaaccatactcttcaggcaaatgatgtcgttattccccacttcacttgatggtggcgcagttggtgctcgtggagatgggataggggatgctaacaccgcactttccaggaaggccagaggctagacttggattaaccccttttgcagcggactgtaagcatctgcatgcttgttggcggtcgggtgtggtttgagccataccgttcaactttttgactcctgcacagcacggaggtggcaccaccccaccctttgataggtagcctagacatggactcaagctacttgccactgtgccacatgttattgctgcatccactgatgcaacgatgaacactgtcaaaacaaagcatgtgaagaacctcaaagcgaaagccattgtgtttgctcttctcttttgggtgataacacaattagttgagttttgttttct

SEQ ID NO: 959 - DNA, 602 bp, Arabidopsis thaliana
agaataataacataacaagtctttaggtatataaaacccatattcataaagtagaaaacaccaatacaacttgcttgtgaaggagacgaactcaaacttcacaagtcattattcataagaacttaataagttttttaaaaagaaagaacaaaaacagaaagctcgaaaatagttattaggaagaaaaattctgctagattccctcgtccttctcgtcctcgctgctgcagctattgttgctgctccattcacacttcaaggtagatctaggcgatccacagtacttaccaagcttctcaaacgtctgatacatcactgttccactctcttctcctagagactcaaatgtcctctctctgcacccatagtcttccaagtctacagtaatctctggcttgtatgagttcgctccaacgctcgagtgcacagctacagagaattgcttgggctcgaagcaagagagaacccttgtcaccagctggctaaggtcaagggtgttgaagtcgtaacccacagcttcgaagctagcgtagctaaacccatcttcaggggtcacatggatcgtggagattgcatccccttcaattgagttcatagagtag

SEQ ID NO: 960 - DNA, 602 bp, Arabidopsis thaliana
  misc_feature (1)...(602): n = A,T,C or G
ctttaacgcattttgtagtgttgggtccttgagatcttgcaatgctggccattcaaagaatagcttagctttatgtcaatgtctcgaggattcttctnnntaggagaaacggacatagttccagtgattgtctcaccctcacatatggttaacacatcttctagatacagaactgtttgtttccagtgtgtagctcgggatttcggtcctgttgagaagcccagcagcttgtggcacatggtaaacgatacatcaaagtaggctacaagggcgtggatgtagtcattgcgttgtgcaacaagcttaaagggagctgtgaaggaagcatcaccagaggacatctttgagatatccatcgtctttagaagcctactatcggtgacgatttggttttggtcgactgtgtcaacaagtggttccatcatagcttttttcttaatacatgacatgtcaaaaccatacacactgttccaaaattcgattttgtcttctttgtactctgaatcctctatggctgtaagatgcagagaggctttgtctggtagcacaactccaccttcaacaagccatttatcacgagcatacaagacacgcggccgcga

SEQ ID NO: 961 - DNA, 601 bp, Arabidopsis thaliana
ttttttttagtaagaaaaggagaagtttctgacgattaataaacccaaagggaaagatatccaaacatccaaagcaaagttaaaagccagagaaaagaaggaagcaatgtacatctttatcttcctgatttatgtatgtacatcaaagtcatccaaagatcgatttttattcaagcaacggtaagagatccaaaagtgttctctccactgtaagtcatgtagaggaacccatcctcatctttgtgttcttcatagatcgcagacatcaatgcagcagttggaggcaatgtgttcttaacaaagacaaaaatagctttctcagctccaagcttgattcttttacgaaccacgtatacaaattgtcccactgttagatcagctggtacaagatacttcttcttgtcaatgtcaggaacatcactttgtccagccttctccacaatcacgggaattctgtcagggtacttctctctgattcgagaagattcactcatccttgcctcgagagggttagagatcttgaaggaactcttagccattgcgattcgattagtctccgaagaagaaactgaatccgatttgttggaaattagggttcgtt

SEQ ID NO: 962 - DNA, 601 bp, Arabidopsis thaliana
  misc_feature (1)...(601): n = A,T,C or G
tcttcttaatccactcgctaaccttagggcgagagtcaaagagcaccttggagtcagtacccaacaagtaatggatggctgnnnggtggtgaagatcagcaagagtgaaggaatcaccagccaactcagatttggcgagcctagcctcgtagacatccaagactttctggagcttaccttcgagctcttggacagcggcagggtcagtggtcatgccgaacatgcctttaaagacacgctcgaaggcaagcttagaggcgttagggtcaaactgttgaccttcaacttgaagccatacgttagtggttgccttgactttcttgcagtcttgggagataagcttttcacctttctcactgtattcctctgctaggtactgtgtgatggctcttgactcgaaaagcgtcaaatcaccgtcctcgagagcaggaatttgaccgaaggggttgagggcaaggtgggcctcttgcttgtgggcaccggctctcatatcgacggggatgagctcgaactggagatctttctcgtaaagagtagcgaggacgcgcattgtggcggtggacatgggaactccgtgaaccttgatactggccatgatgat

SEQ ID NO: 963 - DNA, 601 bp, Arabidopsis thaliana
  misc_feature (1)...(601): n = A,T,C or G
tcaacttctgtgggtcaatttggtaacagatggattgcctgccactgccattggctttaataaacaagattccgatgttatgaaggcaaaaccccgaaaggttggtgaagcagtggtcactgggtggttattcttccgctatttggttatcggagtttatgtcggcctggccactgttgctggctttatatggtggtttgtttactctgatggtggtcctaaacttacttacagtgaactgatgaactttgaaacttgcgcacttagagagacaacttatccctgcagcatatttgaggatcggcacccatctactgtggctatgacagtacttgttgttgtcgagatgtttaatgctctaaataacctcagcgaaaatcaatcccttctggttataacccnnnngagtaacttatggcttgttggttcaattatcctgacgatgcttctgcacgtgctaatattatatgttcatccactggcagtcttattttctgtcacgccattatccnggnccgagtggactgctgttctgtatctttcgtttccagttatcatcatcgatgagcttctgaagttcctctctagaaatacaggcatg

SEQ ID NO: 964 - DNA, 601 bp, Arabidopsis thaliana
  misc_feature (1)...(601): n = A,T,C or G
catagattggtgagaagcaggattgagattgtttcactgcttgagcaagctcctgcaatctaatcttgtaaatcctcaataacaacaaaaacttttnnnttttttcttnnntttnnngatttttagtcttaaaaactaatctttcaaaaatattgatgtgtataatctacaaatcgtatacgtacacaccaatgttactgtttttggtatatgatgatcactgcaaaactctattactgagattagattcatgttgctttcctgaatctgttcttctgtggctttcgtgtctcttttcctgacttgtgattgtttccagaagcttccctttgttttccgaagcttctgttaccggggcgctgtggtcctgttctactttgattaatgtcggaagcaggtgtgtgttgttgatatgttctcttttgccgtttgaatttgttgccatcttgtttggctgtagtttctgatgaagcttctctgtaatttcttttccgcggccctctggatggatcgatggatgtagtctgtgactcattggtctcttctttgtcttttgatttccccgaacggttctctaaaactgtctcgatgaaactcttgt

SEQ ID NO: 965 - DNA, 601 bp, Arabidopsis thaliana
  misc_feature (1)...(601): n = A,T,C or G
ttttttttttttttttttataaaaatgaatttgtattcaaatatggatcgtcaaatgttccaaaaatttcactatcttacaaactaaattaaaccaaaccaccaatttaaatttatattaaataattataccagcagaaattaaaatttaatcatcccaaatgactccaaaactctcccagaaacgtctttgccgcgtcaaggctcgggaaatacgtcggctccataaatatctgactcagtgagtcacacgactcttgactcgccgtcgcgttcatctccgcacttcccatcatagccgccactaactgcctatacccaaagaagaaactcttcgccgccgcttccaccgcttgcatcccctgaagcaaatgaatcttatcgcactctgtcttcctcgcgtaaagcttcatcgccgcctcttgtaatcttggtcctccggttggatctacctcaaccgccaagaccgccggtactttctgtctcagatctttcgacatcttcatcatctccactaatcctttagatctnnnacaaaacgcatcgtttttacccgtcgatttgatctgtaactgtttcttcaatttcaaaaaatcttccgg

SEQ ID NO: 966 - DNA, 601 bp, Arabidopsis thaliana
  misc_feature (1)...(601): n = A,T,C or G
aacagtcaaacttgtaaattacacgaattacaacattagaaagacttggggtttatcttcatgttacaagacccaaatatatattaatcagagtgcaagggataagttaccggcataacccacaacaaagtctgaaaccaaaaggccaaatgaggcctcatttacatggcacagacgtgatagtcgtcctatttccgaatggcataagctggcaatttcgataagtcgggtataacaaaagcaagttcggaagagcctgtcacaaacatgggacttcctggaccccatttaatgactgggggctcactccctaaacccatccaactatgtacctgttttccgctccttacaccccatgcatgggtactaccatcacctgaacctgaaacaacaaacatcccttcaggactaaaggctgcatccaatgtagattctccagctactggtttcacactaaatgtggacagaagagttccacgaaacgagtcaagcacatgaatannaccatccatggttgtaagcagcatgagccttccatcattactaaatttcacaacgtttgcctcagaaagatcaccaccaacggaaaatatttcaaaag

SEQ ID NO: 967 - DNA, 601 bp, Arabidopsis thaliana
ttttaatcaagttggtgggtctaattaaatgatagaaattccacggttgaagaaacaattaagaaagagaaaagcattctaactcattgagccaagagaaaaaaaaaaaaacagcttagagagtgttctccagctacggttgctatatattccaaagctttgatccatctctgcttcactatccaggttttcccttcacatgttttcttgaaagtacttccgaagtctccccgctgtttccgtacatcggacggatcaaatttgtaaaaaatagtcatcacaacttgccccgaagcttctttgcacttcaagatttccaccaactcatctaagcaccagcacgaagaagcgtacttctctgaaagcaccacaatcgagactctagattctctaatcgcttgtatgagctcaggtccgatcgtatggcctctctcgatctcttgatccttgaacggagtgatccctttgctttcgaagtgattgtgtaaatgactgagaaatccactacggacatctggtccatggaaactcgaaaagacatggtatctcttgaagtcagacggtgatgaaaaagccataagagatagagtcggacgcgtgg

SEQ ID NO: 968 - DNA, 601 bp, Arabidopsis thaliana
agtaaaagaaaatcaaaatggcttcacacattgttggatacccacgtatgggccctaagagagagctcaagtttgcattggaatctttctgggatggtaagagcactgctgaggatcttcagaaggtgtctgctgatctcaggtcatccatctggaaacagatgtctgccgctgggactaagttcatccctagcaacacctttgctcactacgaccaggttcttgacaccaccgccatgctcggtgctgttccacctaggtatggatacactggtggtgagatcggccttgatgtttacttctccatggctagaggaaatgcctctgtgcctgccatggaaatgaccaagtggttcgacaccaactaccattacatcgtccctgagttgggccctgaggttaacttctcttacgcatcccacaaggcggtgaatgagtacaaggaggccaaggctcttggtgttgacaccgtccctgtacttgttggcccagtctcttacttgctgctttccaaggctgccaagggtgttgacaagtcattcgaacttctttctcttctccctaagattctcccgatctacaaggaagtgattaccgagct

SEQ ID NO: 969 - DNA, 601 bp, Arabidopsis thaliana
atcaatggcgtcgtctctatctccaccggaagaagcttcgtatcaccaccgtcataccaaaaggtacacctcctccgcttcctccgcttcctccaccaccaacggaaccgtcgaatcatcggtttccgatttcgtcaaacgtcccaaaatctctcatccgaattacatatcaagttccgagatcgaatcagagttttctcatcacgatccagatttcgcaagaatcaacaacggtagttttggttgttgtccgtcatcaatcctagctttacaacaagattggcagctccggttccttcgtcaaccggatcgattctatttcgacgaactcaaaccaaaaatctccgattctagatctgtaatcaaacggttaataaacgccgagcatgacgatgaagtctcgatcgtcgataacgcaacaaccgcagctgcaatcgttcttcaacaaaccgcttgggcttttcgtgaaggtcggttcgataaaggcgacgcggtggttatgcttcattacgcttatggctctgtgaagaaatctgttgaagcgtatgttacacgctccggtggacacgtcatcgaggtacctgcccgggcggccgctcga

SEQ ID NO: 970 - DNA, 601 bp, Arabidopsis thaliana
gcggccgcctcaggtgacagacgtcgttgtgattcaaatctttttccggtgaacttaatttcggaggctattcgatggcatacgtcgaccatgcgttctcgatatcggacgaagacctaatgattgggacttcgtacaccgtcagtaatcgaccaccggtgaaggagatctcactcgcggtgggtctactcgtattcggaaccctaggaattgttttaggtttcttcatggcgtataaccgtgttggtggtgatcgaggtcacgggattttcttcattgtactgggatgtctactgtttatcccggggttttactatacacggattgcatattacgcttacaaaggatacaaaggtttctctttctcaaatataccatccgtttaagccttatgacttggtgtctcttctctcttactcaatgtataggttgtttacgtttttattacttgacttatgctctttagtgtgattttacatgacttgaatgagccatgtttgatacatatgtatctcttttggtttctccttctctatgttagatcattagtcttcgataaccatccttgtataatgtagaccaagctaatcacatgcggccg

SEQ ID NO: 971 - DNA, 601 bp, Arabidopsis thaliana
ccaaaaaaaaagtttctatacagggtaaaaaaaacagttcctaatttacccaagaaaaaaacaaccgtgaaaagaggtaagaagaaagacaaattcttcaaaagcccatatcatttttttacattttgaccttgttgttatgttatctttggttatttctgtttggcacttctccactttaaacgatgctttcaaatgcaacttgtgtgtgagaagaactaggttttaagctcgatgatgagtctccaagacctcttaggagcttaagcacgtcggcttcatcgtccaagaagtatttagctttgcttggttttcttccaaccgtgcatgcaaaaacctctggctgcacaagaagttccggatttgtcactgtgcttaatatgctctcaaacatgtcttcgtctgatctatcgtctcctatgcacatcaccatttccggtggctccccgcgttctaccatttctcggattactttctccgcagctagacctttgcttacaccttgtggtttgacttcaacgatgtgttgacctctcttgacaaccacaggctcattggcgagaacactctctagatgatcaagcatctccttagcttgaca

SEQ ID NO: 972 - DNA, 600 bp, Arabidopsis thaliana
  misc_feature (1)...(600): n = A,T,C or G
tataaaattcgtactaataacccaaacatgtaaacagctccatattacttagtcatctccttaggtggcttgacaataaggatggggcagttggcgtgatgagcgcagtaatcgctaacgctcccaagaaacgctcttttgatcttgccaaggccacgactacccacaacgagaagatcaacgtgcattttctccaccgcctcacaaatcatctccttcgcctcgccttctagcactagagtttcagtacgtatctgcttggctcggcacatttggagagcgcgagagagaagggcagcagaggtctcttgttgtgcctttttcactgactctatcattgatgaagatgcgtacactgctgtggcgccgcccggtccagccggaaaggcagcaaagtgattgaaaggggactgcacatgaatcaccgtgagcattccactttccgcctcagctgccgctgtggtcaataaaagattagagaaatggtcaatgacccattggagagcgtagaagctcgagtcgctctcatcaatcgcaaccaccatccncttcgtcgtcaaacttggtgcttcagcctctgtcgtcgtctctggctgcttc

SEQ ID NO: 973 - DNA, 600 bp, Arabidopsis thaliana
cacgtcacctgagaaccacttccgtcaccggagttacgagccatagcttcagcaaccgtcgcgagtttctgcaaattaagcttcacaaccgtatcagcaaacatacgagtatcatcctccgagttaccttccggcatatcaacgacgtaagattccaaaaccaccgtccagatccgattctctttctcgaaccgatgcaccgtcgtaacggatttgtaattcgtcagcctatgttcgcctccgatgatactgaatccggtaactctccgttcgtcgtcgagtatatcgagtctttccgttgatgtgttcgccggtaatccactgatgacgatcacgtcgcgcgtgcatccgacgcgcatctcgaagttttgttcgacggagcaggatttgatgaagtgtttgtatgtttgtggtttgtcgaatcgtcgtacgattgaccagacgagttccggaggcgcgtggattcgttgcgcgtggagtgatgaacagcttcctggatcgagttggtatgtgtggaactcggcgattgagttttttagttccgatcgttcttctggtgttaactccgaaggcatggttgtaatttggattttttttttt

SEQ ID NO: 974 - DNA, 600 bp, Arabidopsis thaliana
  misc_feature (1)...(600): n = A,T,C or G
cttaattcaaaaactcataaaatgtaacacaaaatcaagttcttgaaacataaagtagaacagaacaagacttaaactgaactatcaaaaaccatatcaaaagcttgaagctttttgtacgggttgcttaagatcttggcttctccttcttttccttgaagagggccaagagtgaaacaccagaaaccttcacgaccttgaacctaactccgggaatatctcccacagcgtgacccttacgaccaaatccagcaatcaagacctcatcgttttcctcgatgtagttcaaacaaccatcattggggacaaaggcagcaatcttctttccattcttgataagctgaactctagcacacttacggatagcagagttaggctgcttagcctcaataccaattttctcaagaacaattcctttagcgtgagaagaaccagcaaaaggcttcttccactcatttcccaagtgagacttcttgtactgcttgtcagcccacctctggttaattcggagtctcttcagcttacnnncagctcccataccacgtgtcttacccatgtttgttgatggaggagaaagatcaacagcaaagagcggaaaat

SEQ ID NO: 975 - DNA, 600 bp, Arabidopsis thaliana
tccattaaaccccaatctcagaacacaaaacgaaaacaaaaataactctaaagaagaaacaacacatttttcgaatttttaaaacttgcttaccataaaattctggattttatttatccagtctaaaatctacaggctgatcatagtagcctgcttagggatttgatgagtagtttaaggttttttcttgtggcttcatctcctgtgaatcccagaatatctgagcttatactctcgacgttcttcaaagtataaaccagagtgtagattgacttctgtatgagttctgtattctcaggagtcataattgacgaattaacctttctcaaatcgtcagaagcttgggtaaggcttcgagtaagacactcaacttccttgagcaagccgctatcacgaaactcagagagcaaaggttgagcatcttcagccatggcttgaatctttttgagcaatggccttgcttcctcaataaccgaagcagctctctcagcaagcgaatacgtattggcaacaccaatggcctcaacttcgcgtccaatacgagtgaaaattccaactaattcatctaaactaactccttgcactccttttattgtctgc

SEQ ID NO: 976 - DNA, 600 bp, Arabidopsis thaliana
taaccatggctcacactctcggtctcactcaacccaactccactgagcctcacaagatctcgttcactgcgaaggagatcgatgtaattgaatggaaaggagacatactcgtagttggtgtgacagagaaggacttagccaaagacggtaactcaaagtttgagaatccgatcttgagcaaggtcgatgctcacttaagtggacttttagctcaagtctcttccgaggaagatttcactgggaaacctggtcaatcgactgttctcaggcttccgggtttaggatcaaagagaatcgctttgatcggtcttggacagtctgtttcgtctccggtggcttttcatagccttggtgaagctgtagctacagtttcaaaagcttctcaatctactagtgctgctattgtgcttgcttcaagtgtttctgatgaatctaagcttagttctgtatcagctttagcttcaggcatagtacttggtttatttgaagatggtaggtataagtctgaatcaaagaaaccatctttgaaagctgttgatattattggatttggaactggggctgaggtagaaaagaagctgaagtatgctgaagatgttt

SEQ ID NO: 977 - DNA, 600 bp, Arabidopsis thaliana
ccacgcgtccgcaacatcttccttctcatcttacaaccatatctctagtatattgttttttggaggaggatccgatgccaactctagagaaactcctacaattgaaagtggtttctttatggtacaacgcctatgttgggaggagaatggtttgctccggcggtgggtttcctcaattgcagaggctttttttatgggaactatatgccttggaagagtggatagtagaagaaggctctatgccacggcttcatactctgcatattgaattctgtaatacattaaaggagattccagatgggctgagatttatcacttcattaaaggaattggttatcaacacaacagaaagagaatttcagaagaaagtatccgaaggaggagaagattactataaaatccaacacattactcttattcgatatgaacattaccacaagaaccagaaaacaacgaggtcaattaatatcttctcagttggattgtgaggctataatatcataataatctgtgttgcattgtgttgatgtggtttggctcctaatcaaactattggctactgttccactaccatactaaatgaacaaaaattaaggtcgt

SEQ ID NO: 978 - DNA, 600 bp, Arabidopsis thaliana
  misc_feature (1)...(600): n = A,T,C or G
tttttttttttttttttttattattataaaacattattccacacatttctgaaggaactgaattacaaactcaccatggtttattttgatgcatacttataagacataagtgtatatagagatgcaattatgcatggtggactggtggtgaatttattttatagttttaacttttaaacacctggtttcgtctgaacaggttcgttaagcccgtggcctcctcctccatggtgtcctccacctccgtagtgtccaccaccaccgtggcctcctcctcctccgtagtgtcctcctcctcctccgtagtgtcctccatgtcctcctccgtatccgtcaagtccgtggccccctcctccgttgtgtcctccatgcccgtggcctcctcctccgtagtggcctccccctccgtgaccaccatgtcctccgtgataaccttcaggttgcacagttgcctcactctctggcttcaccatgcccgactgccttgcggcagaaacttcggagaccaccagaagaattgcgaagagacccaacagaatcaaagnnntggatgccatgtttttcaagttgtaataactctcttagtatgcggacgcgtgg

SEQ ID NO: 979 - DNA, 600 bp, Arabidopsis thaliana
aaaaaaaaaacttgtaaattattagagcgaagaacaaagagtatgaaatgataagagtttgagacgaaagaacaaaagatagaaggaagaagacaagactctcctcgattaaaaaccaaaccacacgttgttctcctaagccttgtttgcgatgttgttagagagccagtcaagtccctcataaagcccttctccggaggtagcacatgtgctctgtatgtaccagtgtcgttgacggagagagtgaagtccaagcttatcggttatctcagcggcgttcatcgcatttggaagatcttgcttgttagcaaaaacgagaagcacagcatctctcaactcatcttcgttcaacattctgtgaagctcatctctggcttccacaacacggtcacgatcattgctgtccaccacaaagataagtccctgagtgttctggaagtagtgcctccacaatggacgaatcttgtcttgacccccgacatcccacacggtaaagctaatgttcttgtattccacagtctccacattgaagccaatggttggaatcgtagtcacgatctctccaagcttgagcttgtacctgcccgggcggccgctcga

SEQ ID NO: 980 - DNA, 599 bp, Arabidopsis thaliana
aatatttgtttttcttcttctcaaataaacaaatcccgggaaaaagaataaaacaacagattgaatccaaaaagaaacaaaaaaaaaagacaagtcagagaaatccaacaacccccaaataagaagaactgtggaaacgtaaagaagaagaagaatcatcatctctggtttgatatcaacaaaaccctagaaaatacaacaaaccctcagatttaacaatttcaatgctgaagcatcatcatcatcaccaaagccattaccaccatagaaagactcgtgaatccaatgctcttcgatgccgacgatgaaaccttctgtggcttttgtagtttgctgagagcaccacagtaaagaacattgtcagggtgtccgaattcggttttgttgttttcgtctggattaaccactctaacgtaagtttcttgtccaagataccacgaatcaagattctctgttcttagattccaagctccaggattgtctaatgatatcaatatcgctgaccatgcccctggatacacctgaatagtggaacgcgcgataccatcccatttgttgtatgttcctctactgttctctgtccactctccataatccat

SEQ ID NO: 981 - DNA, 599 bp, Arabidopsis thaliana
  misc_feature (1)...(599): n = A,T,C or G
ttttttttttttaagtttaaaatggttatgcattttgactttcgagaataagaaaagaattacataatttcttaaagttacaacaagagaactacttgtacaaagtacaaatttacaaagataaaagaaccaaaaaaacaaaacataaaaacaactgcttcttatatgaagcagcatgttattatcttagttaaaataataatcataaaaagtaggaaacgtacaaggaaatacagaacaaattagcaaaaccaaaatatatatataattgnnngnnngatagaaaaaacatcccgacggtgaaacttcctcgagtaatactgtagtcacttttggtcgtgtgtcacagtcatgtctctgagcttttccttctatttgtaccaaagtctcttctctttttcttatttttttttgtcttcgagaaaccaaaagaataaattataatacttttatatagtatagttctctagattgagccataatccaaacctccccaactgaagtgagacccttgtctgacgattgggaaagcatgcatgaaaacgcagacgcaaacgcagaccgttgcaaccgcaagcattgagtgaatgataggagtt

SEQ ID NO: 982 - DNA, 599 bp, Arabidopsis thaliana
  misc_feature (1)...(599): n = A,T,C or G
ccacgcgtccggcatttggcaatgtcaaaaatctgttgtactgcctttagtgatcgtcggttagctgatcattttggagggaagcttcacttgggttacatgctgatccgcgacaaattggcagagcttcaggaggagaagaacaaagttcacaaggaacgggtcgaagaaaggagatcaaaggagaggagtagagagcgagaatcaagtaaagacagagacggaggagataaccgtgaccgaggaagagatgttgaccgcaggagtagagatcgtgacaggcaccatgaccaccgagaacatgacagaaactataatcagtcacgtggctatgactcaagaagccggcgcagttcacggtcccggtctagggaaagaccgagggatcatgatcgccgcagncgccatgaccgctactaaaaccctgccaaagatggttgcacctggtttaagnnnttcttacagatgcgtttaggatctatttggagttacaaacactttcttttttctttgctcaagtgttttaaggatttttgagattgtaacttactttaagtttgtaagaggagcttcttcagataaaaaaaaaaaaaaaaaaa

SEQ ID NO: 983 - DNA, 599 bp, Arabidopsis thaliana
tttttttttttttttttttttttttttttttttttttatttggaagccataatttgaaatgtactacataatctggtccacatcttcaaaccaaagccaaccaaaaaaaaaatcctcagctacaacaacaacatcgttttatagtctatggtttcagaaacatttcctgtgaaccactgatggtccagtctcgtcataatctgctttagtaacatgctgattctgcggaaacaccactttagctagtatggctcctccaacccaagccgaatacatccccaaattctccggcatatattctggcggtttcaccagtgttggcctaatggcagatgagcacaagtttgcttctttctggaatctactttcgaatcctgtcatggaggttgtaccaccacaaagtacagtgttctccaagagctgcctatggttctcagatgacactgtggagataatccggacaagctgctcaacgattccatgctcctccagtcccagtattgatggctgaaacagagcttctccaaccgagtatctctctcgcccgatgcttatcacctgtccatcaggaagagtatgctgctcgatttcacagtttt

SEQ ID NO: 984 - DNA, 598 bp, Arabidopsis thaliana
gacaaaacaagccaaggcgagtcgacttgtactattcaagctggtgtatccgtgcagttgaatcaaaaagaggcgatggtgagatgacatcatgtgaggtactactatttcaccatgaagatatgggaataccgtgggagattgcaaagcttggggtgagacagggtatgtggggtgcagtcaagaagattgagccaggcctacgtgcatatcagagggctaaagcagcgggagcaggtttatccccgagtgccataatggctcacatcaacaccaaagtgagtgcagaggagttcatgaatgagaggggttcgatagcagaggttacaggagacaagccgacggggaaaaacataccaaagatactagtggtaggaggggcgattgcacttgcatgtacattggacaaagggctgttgacaaaggcggtgatattcggagtagccagaagatttgcaagaatgggaaaaaggatgtaggagagagtgtacatgtaagtagacagagaacgaatgagggaatgagagaggtgaaaagactatctctttagtcattgtcttgctggatgtatcaatcatgtaatagcaaagagaaaaag

SEQ ID NO: 985 - DNA, 598 bp, Arabidopsis thaliana
ttttttttttacattaaattggttttgctagaccaagtttttgaagatacataagtagaaattcatagaaatccgtaatgtgaacgacaatgtgaatttacaacagaccgaccaaataaccaacaaccccacacaggtcttttactctaatttttctctttagttttttttttgtttgtttgacataacacagaaagaggcgtctttaaggcctccttttggtcatatataacttttcttatttattgataatcggaaaactctttttctttatcaataataaccttcttcctatgctccacacttttgagacttctgactctgtatatatatattatcagaatttcacaatggacaacatcttcctctctctttgccaacaagatgctggcactcacttattagcttgaaccagaaccagtcgcacatgtttctttaacacctctttcattcacagaatgttcatcacccgctgctgctctattgtgctcattgtttgtttcaggagtgtgattttcagagacatctgatacagatgcagtgctgggtctactgttttctctcgtttctaaacgttccatcatgcgggacacagtgg

SEQ ID NO: 986 - DNA, 598 bp, Arabidopsis thaliana
gcgtcaccagctttaggtctctgggacacgcgccgttcaagtccacgagacacccggtggctccgcatcctccaatgacgattttcttgggcaagattagcatcgggagattgtaaccgtcgacgaggctaacgtcgtaaaaatctagtcctcctgtgccattgagagtaaactcggcgagagttgctggaggtttagctccggagcctgaacattcgacttttcccgagccgcaatctccggttaagcagacgaaagaacctgaactccgatcttgtgaacacaaggttcgtgcccagagacgaccggaccacgactctggtattgcgacggttttagattttcctctagagagacgaaagccagttgtggggagcggcgcagagttagcaccagagagcaaaccgggccatatcgtgttccggcaacgattcgtgatcttgaacgaaattggctcaactgctgaaagagatgagacaaaagccaggatcataaacaagaggatccgattcatcattgctgttgcaggaggattcgatcggattctaaagttgaatgcttgaacgagtaaagcgagcaactttactttcgaacgatg

SEQ ID NO: 987 - DNA, 598 bp, Arabidopsis thaliana
gttttcattgaccataaagcaaaatagaggtctagttatgaaattacagatcaagatcatagcctttaacaaatgttaaagtactataaaaacacaaatcacatggaaacaaaaaaagatctagtaaacttattagttcttcaaaactatcaaccatctctatatataaaaattagatacagattctacaaagctctatacgattcaagaaaacgtgattcaagacgacgagacactcagtaaaaatctcagtcgcttctcatcgactagatcatagaagggagctaggatctgaagtcaaaaactgaataaatcagccaaaataaaaaagttggcaaatcagaaatcaactagatgagaagagaaatcaggaatcatcgacgtcgttgaagaaggtgaaggaaggagaaaaccaccgatccttacggcgtttctatctccggtacgccgtggaagaatcccggcggtgagtttagctagagctgccgtgtactctactagtagctcagtaagaatcaccactgagatcattatagaattggttcttgaaattttcttgactcttaagaaaatttctgatttgtttttaaagaaagat

SEQ ID NO: 988 - DNA, 598 bp, Arabidopsis thaliana
  misc_feature (1)...(598): n = A,T,C or G
tactcctctaccctggaagggaaaagtaaagaaatgtcaacatctgagctctcgggtggagcaagaattctctacattttccaatcagtatttgttaagagcttagaggaggttgatccatgtgaagacttaacagctgatgatattcggactgcaatacaaaatgcaactggtcccagatctgcattatttgttccagatgttccatttgaagttcttgtcaggaggcaaatatctcgtttattagatcccagccttcagtgcgctaggttcatcttcgatgagctagtaaagattagtcatcagtgtatgatgaaagagttacagcggtttccagtcctgcaaaagcgcatggatgaggttattgggaactttctgcgagaaggtcttgaaccttcgcaggcaatgatccgagatcttattgaaatggagatggattatataaacacctcacacccaaattttatcgggggaactaaagccgtngagcaagcaatgcaaacagtcaaatcttctaggattccgcatcctgttgcgcgnnnnngngatactgtggagcctgagaggacggcttcttccgggagtcaaataaaaaccc

SEQ ID NO: 989 - DNA, 598 bp, Arabidopsis thaliana
ccacgcgtccgcaaaaccctctcaaaaattccaaaacataatctcatttctcaagtttaacattttcgagcccctttagaacagtggagaaagatccacacagataaaaaaacgggtgagttttatatcaaatagacgaaaatgcccctgtcggcgacggcggatacaagcaagacggtgaagctggagaggtacaatagctacctccggaagattcacagcaccaaagttctcaacgcttcttctaaagttcttttccgagcaacgcttctcgtagctcttgtcctcgtcctcatcttcgccatcaactaccctccactctccgatagccgcgccgccgcagcacaccacctccaccgtcgtagcttcttatccaccggactcttctcctcctcctcttcttcctcctctatcggtggagccgcgtgggaaaagcgcgttagacaatcctcaacagccaaacgaccacacggtctctccgtcctagtcaccggagctgccggattcgtcggatcccactgctcacttgcgctgcgaaaacgtggcgatggagtcttaggattcgacaacttcaacgattactatgacccatcactca

SEQ ID NO: 990 - DNA, 598 bp, Arabidopsis thaliana
tttttttttttttttggacataaaattaacttattgaattgagagggtacatcaaatcaaatatatgactcacattggctgtaccttattaccaccgaaataaaaacatgaaaacaacgaatcaaacatattacacagcacagcacagccggagaatcatgacgctcacagagctaaaactcaatcgatcgaccaaaccgataaataaaataccgaccactatgatagttgttggttcaaaaacacaagaaagagaccatgaatgaaaccctctttctccaaaaacaacccaattctgtggattttttttacttgcggtggagactcgacagcttaccgagtttcatcttccaaagcacggaatccagcattgagatcgtcgtacaatttcttgaatttttccaccagtgtatcctccccttctgctgggtcttcgaacttctgagacactaaacggtagaaaagatctcctaagcgatgcttgataagagtgtaggtaatcttttgaccgtccattccagctgctctctcaaccgcctggttggctaggttgtagaaatggataatgttacgcatcatccacacggacttgtagaaa

SEQ ID NO: 991 - DNA, 598 bp, Arabidopsis thaliana
ctttttttttttttttttatttaatatagattctacgtcacgcgtaggaacaactatgatttccatttataaaaacttgatacacacgtagtagtagcttacaacaatattggtcgtggtacaatttaaaaacttcaacaatagccgcctttctacggcttattatacgaaggattactctatttattgccacatataaatcgtgaaactatatagtcccttacgagatatgacacttcactcaattgccgttacactccatatagataatttttcatggtacatagccaccgcttccttctccaccaccagcacccccaccgtgaccgtatccagaagcagcagcataacctccacctcctcctcctccacctccggaaccaccaccgcctcctcctccaccaccatgtccaccagctccagcaccaccaccgtatccctctccagctccacctcctgctccgtaaccaccaccatgagctcctccttcgccagaacctcctcctccacccccaccatttccaccgcctccaccacctccatgtcccccggcacctccacctccatatcctcctccagcaccagcaccttgtccacc

SEQ ID NO: 992 - DNA, 598 bp, Arabidopsis thaliana
tccctttcctcctccttctcgccaccgtctccgccgtagctttcgccgaagatgatccagactgtgtatacacattctacctcagaaccggatcgatctggaaagccggaaccgattcgatcatcagcgcaagaatctacgataaggacggtgactacatcggaatcaaaaaccttcaagcttgggctggattaatgggacctgattacaattacttcgagaggggtaatctcgacattttcagtggaagagcaccgtgtttacctagtccgatctgtgccttaaacctaacctccgatggctccggcgatcaccatggttggtacgttaattacgttgagatcacgacggctggtgttcacgcacagtgctcgacgcaggattttgagattgagcaatggctcgctactgatacttctccttatgagctcaccgccgtacggaacaattgtccggtcaagcttagggatagtgttagtcgggtcgggtctgagattcggaaaaagctttcttgggtcgtttaagtgatgtgttgtgattcgtgagacttgtctgtatttgtattctcgttgttcttgtgagtgtaatgtggcgttaa

SEQ ID NO: 993 - DNA, 598 bp, Arabidopsis thaliana
acccagcttaaattcagttcttggagatgaaaatattatcagaaacaaacgaactagaacaaatggctaccgccacaagcaagagatagaaatatggtttttgaaaacacaagtacgactcgtaagagtttcgagcctattcacacaaacacgagataatagaaatcccacataaaaccgacaaccttcttagtactcctctccttcatcatcctcatcgtcaccaccttcagcaccaacctcttcgtaatccttctccaatgctgcaagatcctcacgagcctctgaaaattctccttcttccataccctcacccacataccagtgaacgaaagcacgttttgcgtacataagatcaaacttgtgatcaatacgggagaacacctcagcaacactggtggagtttgagatcatacacacagctctctggactttagcaagatcacctcctggaacaacagttggtggctggtagttgattccacacttgaatccagtaggacaccagtccacaaactgaatagtacgcttggtcttgatggtgccaacagctgcgttcacatccttggggacgacatcaccacggtacatcaaacag

SEQ ID NO: 994 - DNA, 598 bp, Arabidopsis thaliana
tttttttttggaatattgaaacttttatgagcgctagatatatataccttaaatataaagttttacagaaatatgtatggatccaacttccaagacaaaaaatctcacaatgaaaaaaccaaaaaaacaatatcgacgaaattatcaaagtaactaacgttaaatcaaaatcaaattagataggatcgataagatattatatatgtaaacatttgaattattctaatgaaactgatcataacgtgttatatagattcacgtaacgctaataggtctaatattcgattcaggagattgaatggacgcaagcttcagctcaagatcgagtccaccggagttacccgagccggatactgatactttcggatctggatatccaagacgaggattgagtaatccttgtttccaaacaacctttgagctcgacccaatatgatcattacatatcctcttagtagtactattttcttcaacattgccggccgaaaccatatcaaagaggctggtgcggcgtctcttgtgatggagagtggtagtttgccggagaaagtatttttgagcatgacttgccacttgtgtcggggattttgtgacgacg

SEQ ID NO: 995 - DNA, 597 bp, Arabidopsis thaliana
aaagggttaatagataaatgcgtagagcacaaggaacacatagataataagtgcagaaggaacaagtacaacaagaggaacaatagctgcaagtgcatgaaagcttctcttacattccaaaggtccaagtttaatctgaacaagatccactaacgccattgtcaagaacccacatcccaaaaccgacgcaacacacgaagcaacaatcccaacccttaaagctgccaagttcacacgcccctctcccgcgttcaacacacgcgcctcctcctctaaacagttcccgtttgttgttgttgttgttgtcctaattgcttgcttgagagacatagcgatgagactggagaagaggaataaactgaaggagtaaacatggcttgatactagcctctccgctaatgcgggaccttttgcagagatacatcggcggagatggtggttctcggaggctgatgaggaaaccgggaaagtgatgtttccacttgtggttaggccgaggaaaagagcaagcgagaagagtgaattaacgttcacgatgccgtctatagccgtgacgtggattagtgtagttgggaggagtcgtcgccggagaaattc

SEQ ID NO: 996 - DNA, 597 bp, Arabidopsis thaliana
aataagccattgaaaaaaatggcggaggagagcagagtcccatcatcggtgtcggtaacagtcgcccacgaccttcttctagccggccaccgctatctagacgtcaggactccagaagagttcagccagggacatgcctgtggggcgatcaacgtgccttacatgaatcgaggagcatcagggatgtcaaagaaccccgacttcctggaacaagtctcctcccatttcggacaatccgataacatcattgttggctgccagagcggtggtagatctatcaaagccaccaccgatcttctccatgcaggtttcacgggagtcaaagatatcgtcggtggctatagtgcctgggccaagaatggccttcctacaaaggcttgatgactcaccattcaccaaacatctttccttatctcttcgtctccttcttcttcaataatgcatcctttccgcatgtaatcatcaataaatgaccctcctttctctttgctgtctgatgtgatagcttggagggaggggctcatcgcatctttttaaaatatataaaaatacgagtgtgtgttgattgcaaaaaaaaaaaaaaaaaaaaaaaaaaag

SEQ ID NO: 997 - DNA, 597 bp, Arabidopsis thaliana
caaggacatttcatcaaatcatgaccaaatatggagtggtaagacattgaatatcttgcattgccgagaaatttgatggaacgaatcaagtatatgattgatctgagaggaaaaactttgatgaatacaagaacttatatataagcgaaaaaggctgcacaaggggaggcaacgagagcttgacttgcattacggttcctaatcaacaagagaaccaaggtccaacgaataatagtaagagagaaagggaagatgggtttcttcttcacagagttagcttctcagagtttgttacttatactatcaactcatcaggagaagtcattgacacaaaattagttaagcagaaaggcaaagagaccatctaaggtttcattactccattgctgtgaagcgcacaaacattttgtattcttcgcttaatgaccgaaataccctttgagtggtctgagtctcagttgaatcgtcagagggtaaaactggaaatttgattctataagtttcacccaaaaaaaaggaatgacctttagggttttgtattggatttggtctctctcatcattagtttaagtatgaggttctgctcccggaggattt

SEQ ID NO: 998 - DNA, 597 bp, Arabidopsis thaliana
gttctttctctctatcttattctccgatcatcatgatgcagcagccaccacccggaggtatccttccacatcacgctcctcctccttctgcgcaacaacagtacggttaccaacaaccttacgggattgctggagctgctccaccaccaccacagatgtggaatcctcaagcggcggcgccgccatcagttcagcctacgaccgctgacgagatccggactctttggatcggggacttacagtattggatggatgagaatttcctctacggttgctttgctcataccggagagatggtttctgctaaagtgattcgtaacaagcaaaccggtcaagttgaaggatacggtttcattgaattcgcatctcatgctgctgctgaaagagttctacaaacattcaacaacgctcctatcccgagctttcctgatcagctctttagactgaactgggcatcattgagttcaggagataaacgagacgattcaccggactacacgatatttgtcggtgatctggctgctgatgttacggattatatcttacttgagacgttcagagcctcttatccgtcagtgaagggtgcaaaggttgtta

SEQ ID NO: 999 - DNA, 596 bp, Arabidopsis thaliana
gttgattttttccagcaaagtttacggcttttaaccataagatccaaaaaagagatacaacagtaaaacaaactgccaaatatagagttttactggcttgaactggcagctccaacaagaacaccttgagcattaccttccttcttgttacctccttccttgttatcttcttgtttcgttatcctgatcttatacttagcttcaaactctgtaagatctttcttctttttctccaatgtctcgtatagcttcctcacaacctcttcaagtccgtccttgttacgttggacagctggtagtacctctttgatggttctttcgacaagaacgcctcctatcatgcggaagcatttcctcgattggtcgagaggctgaatggcgttaatgaccagagaatgttcgctcacttgcatctcgaggtcggttatgttggagtagatttggcttagctctgatctcttgccttcatacatgttcaaaacagcttgctcattcggcggttctcttaggccaccgcttccagatttgctggccattacttcgatcctatttcagaaacgaatccacacacgaggaagaagatcgaagaagaagaa
